United States Patent Application Publication US 2026/0274913 A1, published September 17, 2026 (application 19/648,642).

The application's sequence listing, which the Patent Office published only in electronic form, follows.

SEQUENCE LISTING (2791 sequences)

SEQ ID NO: 1 - DNA, 1327 bp, synthetic construct
  misc_feature 1..1327: note = Synthetic
  source 1..1327: mol_type = other DNA
gatccccagagactttccagatatctgaagaagtcctgatgtcactgccccggtccttccccaggtagagcaacactcctcgtcgcaacccaactggctccccttaccttctacacacacacacacacacacacacacacacacacacacacacacaaatccaagacaacactactaaggcttctttgggagggggaagtagggataggtaagaggaaagtaagggacctcctatccagcctccatggaatcctgacttcttttccttgttatttcaacttcttccaccccatcttttaaactttagactccagccacagaagcttacaactaaaagaaactctaaggccaatttaatccaaggtttcattctatgtgctggagatggtgtacagtagggtgaggaaaccaaattctcagttggcactggtgtacccttgtacaggtgatgtaacatctctgtgcctcagtttgctcactataaaatagagacggtaggggtcatggtgagcactacctgactagcatataagaagctttcagcaagtgcagactactcttacccacttcccccaagcacagttggggtgggggacagctgaagaggtggaaacatgtgcctgagaatcctaatgaaatcggggtaaaggagcctggaacacatcctgtgaccccgcctgtcctgtaggaagccagtctctggaaagtaaaatggaagggctgcttgggaactttgaggatatttagcccaccccctcatttttacttggggaaactaaggcccagagacctaaggtgactgcctaagttagcaaggagaagtcttgggtattcatcccaggttggggggacccaattatttctcaatcccattgtattctggaatgggcaatttgtccacgtcactgtgacctaggaacacgcgaatgagaacccacagctgagggcctctgcgcacagaacagctgttctccccaggaaatcaactttttttaattgagaagctaaaaaattattctaagagaggtagcccatcctaaaaatagctgtaatgcagaagttcatgttcaaccaatcatttttgcttacgatgcaaaaattgaaaactaagtttattagagaggttagagaaggaggagctctaagcagaaaaaatcctgtgccgggaaaccttgattgtggctttttaatgaatgaagaggcctccctgagcttacaatataaaagggggacagagaggtgaaggtctacacatcaggggcttgctcttgcaaaaccaaaccacaagacagacttgcaaaagaaggcatgcacagctcagcactgc

SEQ ID NO: 2 - protein, 160 aa, synthetic construct
  REGION 1..160: note = Synthetic
SPGQGTQSENSCTHFPGNLPNMLRDLRDAFSRVKTFFQMKDQLDNLLLKESLLEDFKGYLGCQALSEMIQFYLEEVMPQAENQDPDIKAHVNSLGENLKTLRLRLRRCHRFLPCENKSKAVEQVKNAFNKLQEKGIYKAMSEFDIFINYIEAYMTMKIRN

SEQ ID NO: 3 - protein, 166 aa, synthetic construct
  REGION 1..166: note = Synthetic
SPGQGTQSENSCTHFPGNLPNMLRDLLDAFSRVKTFFQMKDQLDNLLLKESLLEDFKGYLGCQALSEMIQFYLEEVMPQAENQDPDIKAHVNSLGENLKTLRLRLRRCHRFLPCENGGGSGGKSKAVEQVKNAFNKLQEKGIYKAMSEFDIFINYIEAYMTMKIRN

SEQ ID NO: 4 - protein, 166 aa, synthetic construct
  REGION 1..166: note = Synthetic
SPGQGTQSENSCTHFPGNLPNMLRDLRDAFSRVKTFFQMKDQLDNLLLKESLLEDFKGYLGCQALSEMIQFYLEEVMPQAENQDPDIKAHVNSLGENLKTLRLRLRRCHRFLPCENGGGSGGKSKAVEQVKNAFNKLQEKGIYLAMSEFDIFINYIEAYMTMKIRN

SEQ ID NO: 5 - protein, 166 aa, synthetic construct
  REGION 1..166: note = Synthetic
SPGQGTQSENSCTHFPGNLPNMLRDLRDAFSRVKTFFQMKDQLDNLLLKESLLEDFKGYLGCQALSEMIQFYLEEVMPQAENQDPDIKAHVNSLGENLKTLRLRLRRCHRFLPCENGGGSGGKSKAVEQVKNAFNKLQEKGIYDAMSEFDIFINYIEAYMTMKIRN

SEQ ID NO: 6 - protein, 166 aa, synthetic construct
  REGION 1..166: note = Synthetic
SPGQGTQSENSCTHFPGNLPNMLRDLRDAFSRVKTFFQMKGQLDNLLLKESLLEDFKGYLGCQALSEMIQFYLEEVMPQAENQDPDIKAHVNSLGENLKTLRLRLRRCHRFLPCENGGGSGGKSKAVEQVKNAFNKLQEKGIYKAMSEFDIFINYIEAYMTMKIRN

SEQ ID NO: 7 - protein, 166 aa, synthetic construct
  REGION 1..166: note = Synthetic
SPGQGTQSENSCTHFPGNLPNMLRDLRDAFSRVKTFFRMKDQLDNLLLKESLLEDFKGYLGCQALSEMIQFYLEEVMPQAENQDPDIKAHVNSLGENLKTLRLRLRRCHRFLPCENGGGSGGKSKAVEQVKNAFNKLQEKGIYKAMSEFDIFINYIEAYMTMKIRN

SEQ ID NO: 8 - protein, 166 aa, synthetic construct
  REGION 1..166: note = Synthetic
SPGQGTQSENSCTHFPGNLPNMLRDLRDAFSRVKTFFQMKDQLDNKLLKESLLEDFKGYLGCQALSEMIQFYLEEVMPQAENQDPDIKAHVNSLGENLKTLRLRLRRCHRFLPCENGGGSGGKSKAVEQVKNAFNKLQEKGIYKAMSEFDIFINYIEAYMTMKIRN

SEQ ID NO: 9 - protein, 166 aa, synthetic construct
  REGION 1..166: note = Synthetic
SPGQGTQSENSCTHFPGNLPNMLRDLRDAFSRVDTFFQMKDQLDNLLLKESLLEDFKGYLGCQALSEMIQFYLEEVMPQAENQDPDIKAHVNSLGENLKTLRLRLRRCHRFLPCENGGGSGGKSKAVEQVKNAFNKLQEKGIYKAMSEFDIFINYIEAYMTMKIRN

SEQ ID NO: 10 - protein, 166 aa, synthetic construct
  REGION 1..166: note = Synthetic
SPGQGTQSENSCTHFPGNLPNMLRDLRDAFSRVKTFFEMKDQLDNLLLKESLLEDFKGYLGCQALSEMIQFYLEEVMPQAENQDPDIKAHVNSLGENLKTLRLRLRRCHRFLPCENGGGSGGKSKAVEQVKNAFNKLQEKGIYKAMSEFDIFINYIEAYMTMKIRN

SEQ ID NO: 11 - DNA, 498 bp, synthetic construct
  misc_feature 1..498: note = Synthetic
  source 1..498: mol_type = other DNA
tctccaggtcaaggtactcaatccgaaaactcctgcacccacttcccgggtaacctgccgaacatgctgcgtgacctgcttgacgctttctcccgtgttaaaaccttcttccagatgaaagaccagctggacaacctgctgctgaaagaatccctgctggaagacttcaaaggttacctgggttgtcaggctctgtccgaaatgatccagttctacctggaagaagttatgccgcaggctgaaaaccaggacccggacatcaaagctcacgttaactccctgggtgaaaacctgaaaaccctgcgtctgcgtctgcgccgttgccatcgattcctgccgtgcgaaaacggtggcggttctggtggtaaatccaaagctgttgaacaggttaaaaacgctttcaacaaactgcaggaaaaaggtatctacaaagctatgtccgaattcgacatcttcatcaactacatcgaagcttacatgaccatgaaaatccgtaac

SEQ ID NO: 12 - DNA, 498 bp, synthetic construct
  misc_feature 1..498: note = Synthetic
  source 1..498: mol_type = other DNA
tctccaggtcaaggtactcaatccgaaaactcctgcacccacttcccgggtaacctgccgaacatgctgcgtgacctgcgtgacgctttctcccgtgttaaaaccttcttccagatgaaagaccagctggacaacctgctgctgaaagaatccctgctggaagacttcaaaggttacctgggttgtcaggctctgtccgaaatgatccagttctacctggaagaagttatgccgcaggctgaaaaccaggacccggacatcaaagctcacgttaactccctgggtgaaaacctgaaaaccctgcgtctgcgtctgcgccgttgccatcgattcctgccgtgcgaaaacggtggcggttctggtggtaaatccaaagctgttgaacaggttaaaaacgctttcaacaaactgcaggaaaaaggtatctacttagctatgtccgaattcgacatcttcatcaactacatcgaagcttacatgaccatgaaaatccgtaac

SEQ ID NO: 13 - DNA, 498 bp, synthetic construct
  misc_feature 1..498: note = Synthetic
  source 1..498: mol_type = other DNA
tctccaggtcaaggtactcaatccgaaaactcctgcacccacttcccgggtaacctgccgaacatgctgcgtgacctgcgtgacgctttctcccgtgttaaaaccttcttccagatgaaagaccagctggacaacctgctgctgaaagaatccctgctggaagacttcaaaggttacctgggttgtcaggctctgtccgaaatgatccagttctacctggaagaagttatgccgcaggctgaaaaccaggacccggacatcaaagctcacgttaactccctgggtgaaaacctgaaaaccctgcgtctgcgtctgcgccgttgccatcgattcctgccgtgcgaaaacggtggcggttctggtggtaaatccaaagctgttgaacaggttaaaaacgctttcaacaaactgcaggaaaaaggtatctacgacgctatgtccgaattcgacatcttcatcaactacatcgaagcttacatgaccatgaaaatccgtaac

SEQ ID NO: 14 - DNA, 498 bp, synthetic construct
  misc_feature 1..498: note = Synthetic
  source 1..498: mol_type = other DNA
tctccaggtcaaggtactcaatccgaaaactcctgcacccacttcccgggtaacctgccgaacatgctgcgtgacctgcgtgacgctttctcccgtgttaaaaccttcttccagatgaaaggccagctggacaacctgctgctgaaagaatccctgctggaagacttcaaaggttacctgggttgtcaggctctgtccgaaatgatccagttctacctggaagaagttatgccgcaggctgaaaaccaggacccggacatcaaagctcacgttaactccctgggtgaaaacctgaaaaccctgcgtctgcgtctgcgccgttgccatcgattcctgccgtgcgaaaacggtggcggttctggtggtaaatccaaagctgttgaacaggttaaaaacgctttcaacaaactgcaggaaaaaggtatctacaaagctatgtccgaattcgacatcttcatcaactacatcgaagcttacatgaccatgaaaatccgtaac

SEQ ID NO: 15 - DNA, 498 bp, synthetic construct
  misc_feature 1..498: note = Synthetic
  source 1..498: mol_type = other DNA
tctccaggtcaaggtactcaatccgaaaactcctgcacccacttcccgggtaacctgccgaacatgctgcgtgacctgcgtgacgctttctcccgtgttaaaaccttcttccggatgaaagaccagctggacaacctgctgctgaaagaatccctgctggaagacttcaaaggttacctgggttgtcaggctctgtccgaaatgatccagttctacctggaagaagttatgccgcaggctgaaaaccaggacccggacatcaaagctcacgttaactccctgggtgaaaacctgaaaaccctgcgtctgcgtctgcgccgttgccatcgattcctgccgtgcgaaaacggtggcggttctggtggtaaatccaaagctgttgaacaggttaaaaacgctttcaacaaactgcaggaaaaaggtatctacaaagctatgtccgaattcgacatcttcatcaactacatcgaagcttacatgaccatgaaaatccgtaac

SEQ ID NO: 16 - DNA, 498 bp, synthetic construct
  misc_feature 1..498: note = Synthetic
  source 1..498: mol_type = other DNA
tctccaggtcaaggtactcaatccgaaaactcctgcacccacttcccgggtaacctgccgaacatgctgcgtgacctgcgtgacgctttctcccgtgttaaaaccttcttccagatgaaagaccagctggacaacaagctgctgaaagaatccctgctggaagacttcaaaggttacctgggttgtcaggctctgtccgaaatgatccagttctacctggaagaagttatgccgcaggctgaaaaccaggacccggacatcaaagctcacgttaactccctgggtgaaaacctgaaaaccctgcgtctgcgtctgcgccgttgccatcgattcctgccgtgcgaaaacggtggcggttctggtggtaaatccaaagctgttgaacaggttaaaaacgctttcaacaaactgcaggaaaaaggtatctacaaagctatgtccgaattcgacatcttcatcaactacatcgaagcttacatgaccatgaaaatccgtaac

SEQ ID NO: 17 - DNA, 498 bp, synthetic construct
  misc_feature 1..498: note = Synthetic
  source 1..498: mol_type = other DNA
tctccaggtcaaggtactcaatccgaaaactcctgcacccacttcccgggtaacctgccgaacatgctgcgtgacctgcgtgacgctttctcccgtgttgacaccttcttccagatgaaagaccagctggacaacctgctgctgaaagaatccctgctggaagacttcaaaggttacctgggttgtcaggctctgtccgaaatgatccagttctacctggaagaagttatgccgcaggctgaaaaccaggacccggacatcaaagctcacgttaactccctgggtgaaaacctgaaaaccctgcgtctgcgtctgcgccgttgccatcgattcctgccgtgcgaaaacggtggcggttctggtggtaaatccaaagctgttgaacaggttaaaaacgctttcaacaaactgcaggaaaaaggtatctacaaagctatgtccgaattcgacatcttcatcaactacatcgaagcttacatgaccatgaaaatccgtaac

SEQ ID NO: 18 - DNA, 498 bp, synthetic construct
  misc_feature 1..498: note = Synthetic
  source 1..498: mol_type = other DNA
tctccaggtcaaggtactcaatccgaaaactcctgcacccacttcccgggtaacctgccgaacatgctgcgtgacctgcgtgacgctttctcccgtgttaaaaccttcttcgagatgaaagaccagctggacaacctgctgctgaaagaatccctgctggaagacttcaaaggttacctgggttgtcaggctctgtccgaaatgatccagttctacctggaagaagttatgccgcaggctgaaaaccaggacccggacatcaaagctcacgttaactccctgggtgaaaacctgaaaaccctgcgtctgcgtctgcgccgttgccatcgattcctgccgtgcgaaaacggtggcggttctggtggtaaatccaaagctgttgaacaggttaaaaacgctttcaacaaactgcaggaaaaaggtatctacaaagctatgtccgaattcgacatcttcatcaactacatcgaagcttacatgaccatgaaaatccgtaac

SEQ ID NO: 19 - DNA, 905 bp, synthetic construct
  misc_feature 1..905: note = Synthetic
  source 1..905: mol_type = other DNA
gtcccgggagccctcagcagcagttggagctggtgcacaggaaggatgaggaagaccaggctctgggggctgctgtggatgctctttgtctcagaactccgagctgcaactaaattaactgaggaaaagtatgaactgaaagaggggcagaccctggatgtgaaatgtgactacacgctagagaagtttgccagcagccagaaagcttggcagataataagggacggagagatgcccaagaccctggcatgcacagagaggccttcaaagaattcccatccagtccaagtggggaggatcatactagaagactaccatgatcatggtttactgcgcgtccgaatggtcaaccttcaagtggaagattctggactgtatcagtgtgtgatctaccagcctcccaaggagcctcacatgctgttcgatcgcatccgcttggtggtgaccaagggtttttcagggacccctggctccaatgagaattctacccagaatgtgtataagattcctcctaccaccactaaggccttgtgcccactctataccagccccagaactgtgacccaagctccacccaagtcaactgccgatgtctccactcctgactctgaaatcaaccttacaaatgtgacagatatcatcagggttccggtgttcaacattgtcattctcctggctggtggattcctgagtaagagcctggtcttctctgtcctgtttgctgtcacgctgaggtcatttgtaccctaggcccacgaacccacgagaatgtcctctgacttccagccacatccatctggcagttgtgccaagggaggagggaggaggtaaaaggcagggagttaataacatgaattaaatctgtaatcaccgccaaaaaaaaaaaaaaaaaaaaaaaaaaaaaa

SEQ ID NO: 20 - protein, 234 aa, synthetic construct
  REGION 1..234: note = Synthetic
MRKTRLWGLLWMLFVSELRAATKLTEEKYELKEGQTLDVKCDYTLEKFASSQKAWQIIRDGEMPKTLACTERPSKNSHPVQVGRIILEDYHDHGLLRVRMVNLQVEDSGLYQCVIYQPPKEPHMLFDRIRLVVTKGFSGTPGSNENSTQNVYKIPPTTTKALCPLYTSPRTVTQAPPKSTADVSTPDSEINLTNVTDIIRVPVFNIVILLAGGFLSKSLVFSVLFAVTLRSFVP

SEQ ID NO: 21 - DNA, 921 bp, synthetic construct
  misc_feature 1..921: note = Synthetic
  source 1..921: mol_type = other DNA
cactctggtggggctgctccaggcatgcagatcccacaggcgccctggccagtcgtctgggcggtgctacaactgggctggcggccaggatggttcttagactccccagacaggccctggaacccccccaccttctccccagccctgctcgtggtgaccgaaggggacaacgccaccttcacctgcagcttctccaacacatcggagagcttcgtgctaaactggtaccgcatgagccccagcaaccagacggacaagctggccgccttccccgaggaccgcagccagcccggccaggactgccgcttccgtgtcacacaactgcccaacgggcgtgacttccacatgagcgtggtcagggcccggcgcaatgacagcggcacctacctctgtggggccatctccctggcccccaaggcgcagatcaaagagagcctgcgggcagagctcagggtgacagagagaagggcagaagtgcccacagcccaccccagcccctcacccaggtcagccggccagttccaaaccctggtggttggtgtcgtgggcggcctgctgggcagcctggtgctgctagtctgggtcctggccgtcatctgctcccgggccgcacgagggacaataggagccaggcgcaccggccagcccctgaaggaggacccctcagccgtgcctgtgttctctgtggactatggggagctggatttccagtggcgagagaagaccccggagccccccgtgccctgtgtccctgagcagacggagtatgccaccattgtctttcctagcggaatgggcacctcatcccccgcccgcaggggctcagctgacggccctcggagtgcccagccactgaggcctgaggatggacactgctcttggcccctctgaccggcttccttggccaccagtgttctgcag

SEQ ID NO: 22 - protein, 288 aa, synthetic construct [sequence omitted]

SEQ ID NO: 23 - DNA, 708 bp, synthetic construct
  misc_feature 1..708: note = Synthetic
  source 1..708: mol_type = other DNA
atggacatgagggtgcccgctcagctcctggggctcctgctgctgtggctgagaggtgcgcgctgtgacatccagatgacccagtttccatcttccgtgtctgcatctgtaggagacagagtcaccatcacttgtcgggcgagtcaggggattagcaggtggttagcctggtatcagcagaaacaagggaaagcccctaagctcctgatctatatggtatccagtttgcaaagtggggtcccatcaaggttcagtggcagtggatctgggacagatttcactctcaccatcagcagcctgcagcctgaagattttgcaacttactattgtcagcagtctcacaatttcccgatcaccttcggccaagggacacgactggacattaaacgaacggtggctgcaccatctgtcttcatcttcccgccatctgatgagcagttgaaatctggaactgcctctgttgtgtgcctgctgaataacttctatcccagagaggccaaagtacagtggaaggtggataacgccctccaatcgggtaactcccaggagagtgtcacagagcaggacagcaaggacagcacctacagcctcagcagcaccctgacgctgagcaaagcagactacgagaaacacaaagtctacgcctgcgaagtcacccatcagggcctgagctcgcccgtcacaaagagcttcaacaggggagagtgt

SEQ ID NO: 24 - DNA, 1413 bp, synthetic construct
  misc_feature 1..1413: note = Synthetic
  source 1..1413: mol_type = other DNA
atggacatgagggtgcccgctcagctcctggggctcctgctgctgtggctgagaggtgcgcgctgtcaggtgcagctggtgcagtctggggctgaggtgaagaagcctggggcctcagtgaaggtctcctgcaaggcttctggatacaccttcaccggctactatatgcactgggtgcgacaggcccctggacaagggcttgagtggatgggatggttcaaacctaatagtggtgtcacaaactatgcacagaagtttcagggcagggtcaccatgagcagggacacgtccatcagcacagcctacatggagctgagcagcctgagatctgacgacacggccgtgtattactgtgcgagagccggatacagcaccagttggaaagactggttcgacccctggggccagggaaccctggtcaccgtctcttcagccagcaccaaggggccatccgtcttccccctggcgccctgctccaggagcacctccgagagcacagccgccctgggctgcctggtcaaggactacttccccgaaccggtgacggtgtcgtggaactcaggcgccctgaccagcggcgtgcacaccttcccggctgtcctacagtcctcaggactctactccctcagcagcgtggtgaccgtgccctccagcagcttgggcacgaagacctacacctgcaacgtagatcacaagcccagcaacaccaaggtggacaagagagttgagtccaaatatggtcccccatgcccatcatgcccagcacctgagttcctggggggaccatcagtcttcctgttccccccaaaacccaaggacactctcatgatctcccggacccctgaggtcacgtgcgtggtggtggacgtgagccaggaagaccccgaggtccagttcaactggtacgtggatggcgtggaggtgcataatgccaagacaaagccgcgggaggagcagttcaacagcacgtaccgtgtggtcagcgtcctcaccgtcctgcaccaggactggctgaacggcaaggagtacaagtgcaaggtctccaacaaaggcctcccgtcctccatcgagaaaaccatctccaaagccaaagggcagccccgagagccacaggtgtacaccctgcccccatcccaggaggagatgaccaagaaccaggtcagcctgacctgcctggtcaaaggcttctaccccagcgacatcgccgtggagtgggagagcaatgggcagccggagaacaactacaagaccacgcctcccgtgctggactccgacggctccttcttcctctacagcaggctaaccgtggacaagagcaggtggcaggaggggaatgtcttctcatgctccgtgatgcatgaggctctgcacaaccactacacacagaagagcctctccctgtctctgggcaaa

SEQ ID NO: 25 - protein, 236 aa, synthetic construct
  REGION 1..236: note = Synthetic
MDMRVPAQLLGLLLLWLRGARCDIQMTQFPSSVSASVGDRVTITCRASQGISRWLAWYQQKQGKAPKLLIYMVSSLQSGVPSRFSGSGSGTDFTLTISSLQPEDFATYYCQQSHNFPITFGQGTRLDIKRTVAAPSVFIFPPSDEQLKSGTASVVCLLNNFYPREAKVQWKVDNALQSGNSQESVTEQDSKDSTYSLSSTLTLSKADYEKHKVYACEVTHQGLSSPVTKSFNRGEC

SEQ ID NO: 26 - protein, 471 aa, synthetic construct
  REGION 1..471: note = Synthetic
MDMRVPAQLLGLLLLWLRGARCQVQLVQSGAEVKKPGASVKVSCKASGYTFTGYYMHWVRQAPGQGLEWMGWFKPNSGVTNYAQKFQGRVTMSRDTSISTAYMELSSLRSDDTAVYYCARAGYSTSWKDWFDPWGQGTLVTVSSASTKGPSVFPLAPCSRSTSESTAALGCLVKDYFPEPVTVSWNSGALTSGVHTFPAVLQSSGLYSLSSVVTVPSSSLGTKTYTCNVDHKPSNTKVDKRVESKYGPPCPSCPAPEFLGGPSVFLFPPKPKDTLMISRTPEVTCVVVDVSQEDPEVQFNWYVDGVEVHNAKTKPREEQFNSTYRVVSVLTVLHQDWLNGKEYKCKVSNKGLPSSIEKTISKAKGQPREPQVYTLPPSQEEMTKNQVSLTCLVKGFYPSDIAVEWESNGQPENNYKTTPPVLDSDGSFFLYSRLTVDKSRWQEGNVFSCSVMHEALHNHYTQKSLSLSLGK

SEQ ID NO: 27 - DNA, 33 bp, synthetic construct
  misc_feature 1..33: note = Synthetic
  source 1..33: mol_type = other DNA
cgggcgagtcaggggattagcaggtggttagcc

SEQ ID NO: 28 - DNA, 21 bp, synthetic construct
  misc_feature 1..21: note = Synthetic
  source 1..21: mol_type = other DNA
atggtatccagtttgcaaagt

SEQ ID NO: 29 - DNA, 27 bp, synthetic construct
  misc_feature 1..27: note = Synthetic
  source 1..27: mol_type = other DNA
cagcagtctcacaatttcccgatcacc

SEQ ID NO: 30 - protein, 11 aa, synthetic construct
  REGION 1..11: note = Synthetic
RASQGISRWLA

SEQ ID NO: 31 - protein, 7 aa, synthetic construct
  REGION 1..7: note = Synthetic
MVSSLQS

SEQ ID NO: 32 - protein, 9 aa, synthetic construct
  REGION 1..9: note = Synthetic
QQSHNFPIT

SEQ ID NO: 33 - DNA, 15 bp, synthetic construct
  misc_feature 1..15: note = Synthetic
  source 1..15: mol_type = other DNA
ggctactatatgcac

SEQ ID NO: 34 - DNA, 51 bp, synthetic construct
  misc_feature 1..51: note = Synthetic
  source 1..51: mol_type = other DNA
tggttcaaacctaatagtggtgtcacaaactatgcacagaagtttcagggc

SEQ ID NO: 35 - DNA, 39 bp, synthetic construct
  misc_feature 1..39: note = Synthetic
  source 1..39: mol_type = other DNA
gccggatacagcaccagttggaaagactggttcgacccc

SEQ ID NO: 36 - protein, 5 aa, synthetic construct
  REGION 1..5: note = Synthetic
GYYMH

SEQ ID NO: 37 - protein, 17 aa, synthetic construct
  REGION 1..17: note = Synthetic
WFKPNSGVTNYAQKFQG

SEQ ID NO: 38 - protein, 13 aa, synthetic construct
  REGION 1..13: note = Synthetic
AGYSTSWKDWFDP

SEQ ID NO: 39 - DNA, 321 bp, synthetic construct
  misc_feature 1..321: note = Synthetic
  source 1..321: mol_type = other DNA
gacatccagatgacccagtttccatcttccgtgtctgcatctgtaggagacagagtcaccatcacttgtcgggcgagtcaggggattagcaggtggttagcctggtatcagcagaaacaagggaaagcccctaagctcctgatctatatggtatccagtttgcaaagtggggtcccatcaaggttcagtggcagtggatctgggacagatttcactctcaccatcagcagcctgcagcctgaagattttgcaacttactattgtcagcagtctcacaatttcccgatcaccttcggccaagggacacgactggacattaaa

SEQ ID NO: 40 - DNA, 366 bp, synthetic construct
  misc_feature 1..366: note = Synthetic
  source 1..366: mol_type = other DNA
caggtgcagctggtgcagtctggggctgaggtgaagaagcctggggcctcagtgaaggtctcctgcaaggcttctggatacaccttcaccggctactatatgcactgggtgcgacaggcccctggacaagggcttgagtggatgggatggttcaaacctaatagtggtgtcacaaactatgcacagaagtttcagggcagggtcaccatgagcagggacacgtccatcagcacagcctacatggagctgagcagcctgagatctgacgacacggccgtgtattactgtgcgagagccggatacagcaccagttggaaagactggttcgacccctggggccagggaaccctggtcaccgtctcttca

SEQ ID NO: 41 - protein, 107 aa, synthetic construct
  REGION 1..107: note = Synthetic
DIQMTQFPSSVSASVGDRVTITCRASQGISRWLAWYQQKQGKAPKLLIYMVSSLQSGVPSRFSGSGSGTDFTLTISSLQPEDFATYYCQQSHNFPITFGQGTRLDIK

SEQ ID NO: 42 - protein, 122 aa, synthetic construct
  REGION 1..122: note = Synthetic
QVQLVQSGAEVKKPGASVKVSCKASGYTFTGYYMHWVRQAPGQGLEWMGWFKPNSGVTNYAQKFQGRVTMSRDTSISTAYMELSSLRSDDTAVYYCARAGYSTSWKDWFDPWGQGTLVTVSS

SEQ ID NO: 43 - DNA, 708 bp, synthetic construct
  misc_feature 1..708: note = Synthetic
  source 1..708: mol_type = other DNA
atggacatgagggtgcccgctcagctcctggggctcctgctgctgtggctgagaggtgcgcgctgtgacacccagatgacccagtctccatcctccctgtctgcatctgaaggagacagagtcaccatcacttgccaggcgagtcaggacattttcaacgatttaaattggtatcaggagaaaccagggaaagcccctaagctcctgatctaccatgcatccaatttggaaacaggggtcccatcaaggttcagtggaagtggatctgggacagattatactttcaccatcagcagcctgcagcctgaagatattgctacatattactgtcaacaatatggaaatctcccgctcactttcggcggagggaccaaggtggagatcaaacgaacggtggctgcaccatctgtcttcatcttcccgccatctgatgagcagttgaaatctggaactgcctctgttgtgtgcctgctgaataacttctatcccagagaggccaaagtacagtggaaggtggataacgccctccaatcgggtaactcccaggagagtgtcacagagcaggacagcaaggacagcacctacagcctcagcagcaccctgacgctgagcaaagcagactacgagaaacacaaagtctacgcctgcgaagtcacccatcagggcctgagctcgcccgtcacaaagagcttcaacaggggagagtgt

SEQ ID NO: 44 - DNA, 1419 bp, synthetic construct
  misc_feature 1..1419: note = Synthetic
  source 1..1419: mol_type = other DNA
atggacatgagggtgcccgctcagctcctggggctcctgctgctgtggctgagaggtgcgcgctgtcaggtgcagctggtgcagtctggggctgaggtgaagaagcctggggcctcagtgaaggtctcctgcaaggcttctggatacaccttcaccagttatgatatcaactgggtgcgacaggccactggacaagggcttgagtggatgggatggatgaaccctaacaggggtaacacaggctatgtaaagaagttccagggcagagtcaccatgaccaggaacacctccataagcacagcctacatggagctgagtagtctgagatctgaggacacggccgtgtattactgtgcgagaaggagggccgtgtatcgcagcagctgggagtggtacttcgatctctggggccgtggcaccctggtcactgtctcctcagccagcaccaaggggccatccgtcttccccctggcgccctgctccaggagcacctccgagagcacagccgccctgggctgcctggtcaaggactacttccccgaaccggtgacggtgtcgtggaactcaggcgccctgaccagcggcgtgcacaccttcccggctgtcctacagtcctcaggactctactccctcagcagcgtggtgaccgtgccctccagcagcttgggcacgaagacctacacctgcaacgtagatcacaagcccagcaacaccaaggtggacaagagagttgagtccaaatatggtcccccatgcccatcatgcccagcacctgagttcctggggggaccatcagtcttcctgttccccccaaaacccaaggacactctcatgatctcccggacccctgaggtcacgtgcgtggtggtggacgtgagccaggaagaccccgaggtccagttcaactggtacgtggatggcgtggaggtgcataatgccaagacaaagccgcgggaggagcagttcaacagcacgtaccgtgtggtcagcgtcctcaccgtcctgcaccaggactggctgaacggcaaggagtacaagtgcaaggtctccaacaaaggcctcccgtcctccatcgagaaaaccatctccaaagccaaagggcagccccgagagccacaggtgtacaccctgcccccatcccaggaggagatgaccaagaaccaggtcagcctgacctgcctggtcaaaggcttctaccccagcgacatcgccgtggagtgggagagcaatgggcagccggagaacaactacaagaccacgcctcccgtgctggactccgacggctccttcttcctctacagcaggctaaccgtggacaagagcaggtggcaggaggggaatgtcttctcatgctccgtgatgcatgaggctctgcacaaccactacacacagaagagcctctccctgtctctgggcaaa

SEQ ID NO: 45 - protein, 236 aa, synthetic construct
  REGION 1..236: note = Synthetic
MDMRVPAQLLGLLLLWLRGARCDTQMTQSPSSLSASEGDRVTITCQASQDIFNDLNWYQEKPGKAPKLLIYHASNLETGVPSRFSGSGSGTDYTFTISSLQPEDIATYYCQQYGNLPLTFGGGTKVEIKRTVAAPSVFIFPPSDEQLKSGTASVVCLLNNFYPREAKVQWKVDNALQSGNSQESVTEQDSKDSTYSLSSTLTLSKADYEKHKVYACEVTHQGLSSPVTKSFNRGEC

SEQ ID NO: 46 - protein, 473 aa, synthetic construct
  REGION 1..473: note = Synthetic
MDMRVPAQLLGLLLLWLRGARCQVQLVQSGAEVKKPGASVKVSCKASGYTFTSYDINWVRQATGQGLEWMGWMNPNRGNTGYVKKFQGRVTMTRNTSISTAYMELSSLRSEDTAVYYCARRRAVYRSSWEWYFDLWGRGTLVTVSSASTKGPSVFPLAPCSRSTSESTAALGCLVKDYFPEPVTVSWNSGALTSGVHTFPAVLQSSGLYSLSSVVTVPSSSLGTKTYTCNVDHKPSNTKVDKRVESKYGPPCPSCPAPEFLGGPSVFLFPPKPKDTLMISRTPEVTCVVVDVSQEDPEVQFNWYVDGVEVHNAKTKPREEQFNSTYRVVSVLTVLHQDWLNGKEYKCKVSNKGLPSSIEKTISKAKGQPREPQVYTLPPSQEEMTKNQVSLTCLVKGFYPSDIAVEWESNGQPENNYKTTPPVLDSDGSFFLYSRLTVDKSRWQEGNVFSCSVMHEALHNHYTQKSLSLSLGK

SEQ ID NO: 47 - DNA, 33 bp, synthetic construct
  misc_feature 1..33: note = Synthetic
  source 1..33: mol_type = other DNA
caggcgagtcaggacattttcaacgatttaaat

SEQ ID NO: 48 - DNA, 21 bp, synthetic construct
  misc_feature 1..21: note = Synthetic
  source 1..21: mol_type = other DNA
catgcatccaatttggaaaca

SEQ ID NO: 49 - DNA, 27 bp, synthetic construct
  misc_feature 1..27: note = Synthetic
  source 1..27: mol_type = other DNA
caacaatatggaaatctcccgctcact

SEQ ID NO: 50 - protein, 11 aa, synthetic construct
  REGION 1..11: note = Synthetic
QASQDIFNDLN

SEQ ID NO: 51 - protein, 7 aa, synthetic construct
  REGION 1..7: note = Synthetic
HASNLET

SEQ ID NO: 52 - protein, 9 aa, synthetic construct
  REGION 1..9: note = Synthetic
QQYGNLPLT

SEQ ID NO: 53 - DNA, 15 bp, synthetic construct
  misc_feature 1..15: note = Synthetic
  source 1..15: mol_type = other DNA
agttatgatatcaac

SEQ ID NO: 54 - DNA, 51 bp, synthetic construct
  misc_feature 1..51: note = Synthetic
  source 1..51: mol_type = other DNA
tggatgaaccctaacaggggtaacacaggctatgtaaagaagttccagggc

SEQ ID NO: 55 - DNA, 45 bp, synthetic construct
  misc_feature 1..45: note = Synthetic
  source 1..45: mol_type = other DNA
aggagggccgtgtatcgcagcagctgggagtggtacttcgatctc

SEQ ID NO: 56 - protein, 5 aa, synthetic construct
  REGION 1..5: note = Synthetic
SYDIN

SEQ ID NO: 57 - protein, 17 aa, synthetic construct
  REGION 1..17: note = Synthetic
WMNPNRGNTGYVKKFQG

SEQ ID NO: 58 - protein, 15 aa, synthetic construct
  REGION 1..15: note = Synthetic
RRAVYRSSWEWYFDL

SEQ ID NO: 59 - DNA, 321 bp, synthetic construct
  misc_feature 1..321: note = Synthetic
  source 1..321: mol_type = other DNA
gacacccagatgacccagtctccatcctccctgtctgcatctgaaggagacagagtcaccatcacttgccaggcgagtcaggacattttcaacgatttaaattggtatcaggagaaaccagggaaagcccctaagctcctgatctaccatgcatccaatttggaaacaggggtcccatcaaggttcagtggaagtggatctgggacagattatactttcaccatcagcagcctgcagcctgaagatattgctacatattactgtcaacaatatggaaatctcccgctcactttcggcggagggaccaaggtggagatcaaa

SEQ ID NO: 60 - DNA, 372 bp, synthetic construct
  misc_feature 1..372: note = Synthetic
  source 1..372: mol_type = other DNA
caggtgcagctggtgcagtctggggctgaggtgaagaagcctggggcctcagtgaaggtctcctgcaaggcttctggatacaccttcaccagttatgatatcaactgggtgcgacaggccactggacaagggcttgagtggatgggatggatgaaccctaacaggggtaacacaggctatgtaaagaagttccagggcagagtcaccatgaccaggaacacctccataagcacagcctacatggagctgagtagtctgagatctgaggacacggccgtgtattactgtgcgagaaggagggccgtgtatcgcagcagctgggagtggtacttcgatctctggggccgtggcaccctggtcactgtctcctca

SEQ ID NO: 61 - protein, 107 aa, synthetic construct
  REGION 1..107: note = Synthetic
DTQMTQSPSSLSASEGDRVTITCQASQDIFNDLNWYQEKPGKAPKLLIYHASNLETGVPSRFSGSGSGTDYTFTISSLQPEDIATYYCQQYGNLPLTFGGGTKVEIK

SEQ ID NO: 62 - protein, 124 aa, synthetic construct
  REGION 1..124: note = Synthetic
QVQLVQSGAEVKKPGASVKVSCKASGYTFTSYDINWVRQATGQGLEWMGWMNPNRGNTGYVKKFQGRVTMTRNTSISTAYMELSSLRSEDTAVYYCARRRAVYRSSWEWYFDLWGRGTLVTVSS

SEQ ID NO: 63 - DNA, 708 bp, synthetic construct
  misc_feature 1..708: note = Synthetic
  source 1..708: mol_type = other DNA
atggacatgagggtgcccgctcagctcctggggctcctgctgctgtggctgagaggtgcgcgctgtgacatccagatgacccagtctccatcctccctgtctgcatctgtaggagacagagtcaccatcacttgccaggcgagtcaggacattagcaaacatttaaattggtatcagcagaaaccagggaaagcccctaagctcctgatctacgatacctccaatttggaaacaggggtcccatcaaggttcagtggaagtggatctgggacagattttactttcaccatcagcagcctgcagcctgaagatattgcaacatataactgtcaacagtatgataagctcccgctcactttcggcggagggaccaaggtggagatcaagcgaacggtggctgcaccatctgtcttcatcttcccgccatctgatgagcagttgaaatctggaactgcctctgttgtgtgcctgctgaataacttctatcccagagaggccaaagtacagtggaaggtggataacgccctccaatcgggtaactcccaggagagtgtcacagagcaggacagcaaggacagcacctacagcctcagcagcaccctgacgctgagcaaagcagactacgagaaacacaaagtctacgcctgcgaagtcacccatcagggcctgagctcgcccgtcacaaagagcttcaacaggggagagtgt

SEQ ID NO: 64 - DNA, 1413 bp, synthetic construct
  misc_feature 1..1413: note = Synthetic
  source 1..1413: mol_type = other DNA
atggacatgagggtgcccgctcagctcctggggctcctgctgctgtggctgagaggtgcgcgctgtcaggtgcagctggtgcagtctggggctgaggtgaagaagcctggggcctcagtgaaggtctcctgcaaggcttctggatacaccttcaccagttatgatatcaactgggtgcgacaggccactggacaagggcttgagtggatgggaaggatgaaccctaagagtggtaatgcaggctatgtacagaacttccggggcagagtcaccatgaccaggaacacctccataagcacagcctacatggagctgagcagcctgagatctgaggacacggccgtgtattactgtgcgagaggcgggcgtaccagcatctggtccttcgtctttgattactggggccagggcaccctggtcaccgtctcctcagccagcaccaaggggccatccgtcttccccctggcgccctgctccaggagcacctccgagagcacagccgccctgggctgcctggtcaaggactacttccccgaaccggtgacggtgtcgtggaactcaggcgccctgaccagcggcgtgcacaccttcccggctgtcctacagtcctcaggactctactccctcagcagcgtggtgaccgtgccctccagcagcttgggcacgaagacctacacctgcaacgtagatcacaagcccagcaacaccaaggtggacaagagagttgagtccaaatatggtcccccatgcccatcatgcccagcacctgagttcctggggggaccatcagtcttcctgttccccccaaaacccaaggacactctcatgatctcccggacccctgaggtcacgtgcgtggtggtggacgtgagccaggaagaccccgaggtccagttcaactggtacgtggatggcgtggaggtgcataatgccaagacaaagccgcgggaggagcagttcaacagcacgtaccgtgtggtcagcgtcctcaccgtcctgcaccaggactggctgaacggcaaggagtacaagtgcaaggtctccaacaaaggcctcccgtcctccatcgagaaaaccatctccaaagccaaagggcagccccgagagccacaggtgtacaccctgcccccatcccaggaggagatgaccaagaaccaggtcagcctgacctgcctggtcaaaggcttctaccccagcgacatcgccgtggagtgggagagcaatgggcagccggagaacaactacaagaccacgcctcccgtgctggactccgacggctccttcttcctctacagcaggctaaccgtggacaagagcaggtggcaggaggggaatgtcttctcatgctccgtgatgcatgaggctctgcacaaccactacacacagaagagcctctccctgtctctgggcaaa

SEQ ID NO: 65 - protein, 236 aa, synthetic construct
  REGION 1..236: note = Synthetic
MDMRVPAQLLGLLLLWLRGARCDIQMTQSPSSLSASVGDRVTITCQASQDISKHLNWYQQKPGKAPKLLIYDTSNLETGVPSRFSGSGSGTDFTFTISSLQPEDIATYNCQQYDKLPLTFGGGTKVEIKRTVAAPSVFIFPPSDEQLKSGTASVVCLLNNFYPREAKVQWKVDNALQSGNSQESVTEQDSKDSTYSLSSTLTLSKADYEKHKVYACEVTHQGLSSPVTKSFNRGEC

SEQ ID NO: 66 - protein, 471 aa, synthetic construct
  REGION 1..471: note = Synthetic
MDMRVPAQLLGLLLLWLRGARCQVQLVQSGAEVKKPGASVKVSCKASGYTFTSYDINWVRQATGQGLEWMGRMNPKSGNAGYVQNFRGRVTMTRNTSISTAYMELSSLRSEDTAVYYCARGGRTSIWSFVFDYWGQGTLVTVSSASTKGPSVFPLAPCSRSTSESTAALGCLVKDYFPEPVTVSWNSGALTSGVHTFPAVLQSSGLYSLSSVVTVPSSSLGTKTYTCNVDHKPSNTKVDKRVESKYGPPCPSCPAPEFLGGPSVFLFPPKPKDTLMISRTPEVTCVVVDVSQEDPEVQFNWYVDGVEVHNAKTKPREEQFNSTYRVVSVLTVLHQDWLNGKEYKCKVSNKGLPSSIEKTISKAKGQPREPQVYTLPPSQEEMTKNQVSLTCLVKGFYPSDIAVEWESNGQPENNYKTTPPVLDSDGSFFLYSRLTVDKSRWQEGNVFSCSVMHEALHNHYTQKSLSLSLGK

SEQ ID NO: 67 - DNA, 33 bp, synthetic construct
  misc_feature 1..33: note = Synthetic
  source 1..33: mol_type = other DNA
caggcgagtcaggacattagcaaacatttaaat

SEQ ID NO: 68 - DNA, 21 bp, synthetic construct
  misc_feature 1..21: note = Synthetic
  source 1..21: mol_type = other DNA
gatacctccaatttggaaaca

SEQ ID NO: 69 - DNA, 27 bp, synthetic construct
  misc_feature 1..27: note = Synthetic
  source 1..27: mol_type = other DNA
caacagtatgataagctcccgctcact

SEQ ID NO: 70 - protein, 11 aa, synthetic construct
  REGION 1..11: note = Synthetic
QASQDISKHLN

SEQ ID NO: 71 - protein, 7 aa, synthetic construct
  REGION 1..7: note = Synthetic
DTSNLET

SEQ ID NO: 72 - protein, 9 aa, synthetic construct
  REGION 1..9: note = Synthetic
QQYDKLPLT

SEQ ID NO: 73 - DNA, 15 bp, synthetic construct
  misc_feature 1..15: note = Synthetic
  source 1..15: mol_type = other DNA
agttatgatatcaac

SEQ ID NO: 74 - DNA, 51 bp, synthetic construct
  misc_feature 1..51: note = Synthetic
  source 1..51: mol_type = other DNA
aggatgaaccctaagagtggtaatgcaggctatgtacagaacttccggggc

SEQ ID NO: 75 - DNA, 39 bp, synthetic construct
  misc_feature 1..39: note = Synthetic
  source 1..39: mol_type = other DNA
ggcgggcgtaccagcatctggtccttcgtctttgattac

SEQ ID NO: 76 - protein, 5 aa, synthetic construct
  REGION 1..5: note = Synthetic
SYDIN

SEQ ID NO: 77 - protein, 17 aa, synthetic construct
  REGION 1..17: note = Synthetic
RMNPKSGNAGYVQNFRG

SEQ ID NO: 78 - protein, 13 aa, synthetic construct
  REGION 1..13: note = Synthetic
GGRTSIWSFVFDY

SEQ ID NO: 79 - DNA, 321 bp, synthetic construct
  misc_feature 1..321: note = Synthetic
  source 1..321: mol_type = other DNA
gacatccagatgacccagtctccatcctccctgtctgcatctgtaggagacagagtcaccatcacttgccaggcgagtcaggacattagcaaacatttaaattggtatcagcagaaaccagggaaagcccctaagctcctgatctacgatacctccaatttggaaacaggggtcccatcaaggttcagtggaagtggatctgggacagattttactttcaccatcagcagcctgcagcctgaagatattgcaacatataactgtcaacagtatgataagctcccgctcactttcggcggagggaccaaggtggagatcaag

SEQ ID NO: 80 - DNA, 366 bp, synthetic construct
  misc_feature 1..366: note = Synthetic
  source 1..366: mol_type = other DNA
caggtgcagctggtgcagtctggggctgaggtgaagaagcctggggcctcagtgaaggtctcctgcaaggcttctggatacaccttcaccagttatgatatcaactgggtgcgacaggccactggacaagggcttgagtggatgggaaggatgaaccctaagagtggtaatgcaggctatgtacagaacttccggggcagagtcaccatgaccaggaacacctccataagcacagcctacatggagctgagcagcctgagatctgaggacacggccgtgtattactgtgcgagaggcgggcgtaccagcatctggtccttcgtctttgattactggggccagggcaccctggtcaccgtctcctca

SEQ ID NO: 81 - protein, 107 aa, synthetic construct
  REGION 1..107: note = Synthetic
DIQMTQSPSSLSASVGDRVTITCQASQDISKHLNWYQQKPGKAPKLLIYDTSNLETGVPSRFSGSGSGTDFTFTISSLQPEDIATYNCQQYDKLPLTFGGGTKVEIK

SEQ ID NO: 82 - protein, 122 aa, synthetic construct
  REGION 1..122: note = Synthetic
QVQLVQSGAEVKKPGASVKVSCKASGYTFTSYDINWVRQATGQGLEWMGRMNPKSGNAGYVQNFRGRVTMTRNTSISTAYMELSSLRSEDTAVYYCARGGRTSIWSFVFDYWGQGTLVTVSS

SEQ ID NO: 83 - DNA, 708 bp, synthetic construct
  misc_feature 1..708: note = Synthetic
  source 1..708: mol_type = other DNA
atggacatgagggtgcccgctcagctcctggggctcctgctgctgtggctgagaggtgcgcgctgtgacatccagatgacccagtctccatcctccctgtctgcatctgtaggagacagagtcaccatcacttgccaggcgagtcgggacattagcaagtatttaaattggtatcaacagaaaccagggaaagcccccaaactccagatctacgatgcatccaatttggaaacaggggtcccatcaaggttcagtggaagtggatctgggacagattttactttcaccatcagcagcctgcagcctgaagatattgcaacatattactgtcaacactatgataatatcccgatcacctttggccaggggacaagactggagattaaacgaacggtggctgcaccatctgtcttcatcttcccgccatctgatgagcagttgaaatctggaactgcctctgttgtgtgcctgctgaataacttctatcccagagaggccaaagtacagtggaaggtggataacgccctccaatcgggtaactcccaggagagtgtcacagagcaggacagcaaggacagcacctacagcctcagcagcaccctgacgctgagcaaagcagactacgagaaacacaaagtctacgcctgcgaagtcacccatcagggcctgagctcgcccgtcacaaagagcttcaacaggggagagtgt

SEQ ID NO: 84 - DNA, 1416 bp, synthetic construct
  misc_feature 1..1416: note = Synthetic
  source 1..1416: mol_type = other DNA
atggacatgagggtgcccgctcagctcctggggctcctgctgctgtggctgagaggtgcgcgctgtcaggtgcagctggtgcagtctggggctgaggtgaagaagcctggggcctcagtgaaggtctcctgcaaggcttctggatacaccttcaccagttatgatatcaattgggtgcgacaggccactggacaagggcttgagtggatgggatggatgaaccctaacagtggtaactcaggctctgtaaagaagttccgggacagagtcaccatgaccaggaacacctccataagcactgcctacatggaattgagcagcctgagatctgaggacacggccgtgtattactgtgtgagacttatagggtatagcagtgcctggaagtggtccttccagcactggggccagggcaccctggtcaccgtctcctcagccagcaccaaggggccatccgtcttccccctggcgccctgctccaggagcacctccgagagcacagccgccctgggctgcctggtcaaggactacttccccgaaccggtgacggtgtcgtggaactcaggcgccctgaccagcggcgtgcacaccttcccggctgtcctacagtcctcaggactctactccctcagcagcgtggtgaccgtgccctccagcagcttgggcacgaagacctacacctgcaacgtagatcacaagcccagcaacaccaaggtggacaagagagttgagtccaaatatggtcccccatgcccatcatgcccagcacctgagttcctggggggaccatcagtcttcctgttccccccaaaacccaaggacactctcatgatctcccggacccctgaggtcacgtgcgtggtggtggacgtgagccaggaagaccccgaggtccagttcaactggtacgtggatggcgtggaggtgcataatgccaagacaaagccgcgggaggagcagttcaacagcacgtaccgtgtggtcagcgtcctcaccgtcctgcaccaggactggctgaacggcaaggagtacaagtgcaaggtctccaacaaaggcctcccgtcctccatcgagaaaaccatctccaaagccaaagggcagccccgagagccacaggtgtacaccctgcccccatcccaggaggagatgaccaagaaccaggtcagcctgacctgcctggtcaaaggcttctaccccagcgacatcgccgtggagtgggagagcaatgggcagccggagaacaactacaagaccacgcctcccgtgctggactccgacggctccttcttcctctacagcaggctaaccgtggacaagagcaggtggcaggaggggaatgtcttctcatgctccgtgatgcatgaggctctgcacaaccactacacacagaagagcctctccctgtctctgggcaaa

SEQ ID NO: 85 - protein, 236 aa, synthetic construct
  REGION 1..236: note = Synthetic
MDMRVPAQLLGLLLLWLRGARCDIQMTQSPSSLSASVGDRVTITCQASRDISKYLNWYQQKPGKAPKLQIYDASNLETGVPSRFSGSGSGTDFTFTISSLQPEDIATYYCQHYDNIPITFGQGTRLEIKRTVAAPSVFIFPPSDEQLKSGTASVVCLLNNFYPREAKVQWKVDNALQSGNSQESVTEQDSKDSTYSLSSTLTLSKADYEKHKVYACEVTHQGLSSPVTKSFNRGEC

SEQ ID NO: 86 - protein, 472 aa, synthetic construct
  REGION 1..472: note = Synthetic
MDMRVPAQLLGLLLLWLRGARCQVQLVQSGAEVKKPGASVKVSCKASGYTFTSYDINWVRQATGQGLEWMGWMNPNSGNSGSVKKFRDRVTMTRNTSISTAYMELSSLRSEDTAVYYCVRLIGYSSAWKWSFQHWGQGTLVTVSSASTKGPSVFPLAPCSRSTSESTAALGCLVKDYFPEPVTVSWNSGALTSGVHTFPAVLQSSGLYSLSSVVTVPSSSLGTKTYTCNVDHKPSNTKVDKRVESKYGPPCPSCPAPEFLGGPSVFLFPPKPKDTLMISRTPEVTCVVVDVSQEDPEVQFNWYVDGVEVHNAKTKPREEQFNSTYRVVSVLTVLHQDWLNGKEYKCKVSNKGLPSSIEKTISKAKGQPREPQVYTLPPSQEEMTKNQVSLTCLVKGFYPSDIAVEWESNGQPENNYKTTPPVLDSDGSFFLYSRLTVDKSRWQEGNVFSCSVMHEALHNHYTQKSLSLSLGK

SEQ ID NO: 87 - DNA, 33 bp, synthetic construct
  misc_feature 1..33: note = Synthetic
  source 1..33: mol_type = other DNA
caggcgagtcgggacattagcaagtatttaaat

SEQ ID NO: 88 - DNA, 21 bp, synthetic construct
  misc_feature 1..21: note = Synthetic
  source 1..21: mol_type = other DNA
gatgcatccaatttggaaaca

SEQ ID NO: 89 - DNA, 27 bp, synthetic construct
  misc_feature 1..27: note = Synthetic
  source 1..27: mol_type = other DNA
caacactatgataatatcccgatcacc

SEQ ID NO: 90 - protein, 11 aa, synthetic construct
  REGION 1..11: note = Synthetic
QASRDISKYLN

SEQ ID NO: 91 - protein, 7 aa, synthetic construct
  REGION 1..7: note = Synthetic
DASNLET

SEQ ID NO: 92 - protein, 9 aa, synthetic construct
  REGION 1..9: note = Synthetic
QHYDNIPIT

SEQ ID NO: 93 - DNA, 15 bp, synthetic construct
  misc_feature 1..15: note = Synthetic
  source 1..15: mol_type = other DNA
agttatgatatcaat

SEQ ID NO: 94 - DNA, 51 bp, synthetic construct
  misc_feature 1..51: note = Synthetic
  source 1..51: mol_type = other DNA
tggatgaaccctaacagtggtaactcaggctctgtaaagaagttccgggac

SEQ ID NO: 95 - DNA, 42 bp, synthetic construct
  misc_feature 1..42: note = Synthetic
  source 1..42: mol_type = other DNA
cttatagggtatagcagtgcctggaagtggtccttccagcac

SEQ ID NO: 96 - protein, 5 aa, synthetic construct
  REGION 1..5: note = Synthetic
SYDIN

SEQ ID NO: 97 - protein, 17 aa, synthetic construct
  REGION 1..17: note = Synthetic
WMNPNSGNSGSVKKFRD

SEQ ID NO: 98 - protein, 14 aa, synthetic construct
  REGION 1..14: note = Synthetic
LIGYSSAWKWSFQH

SEQ ID NO: 99 - DNA, 321 bp, synthetic construct
  misc_feature 1..321: note = Synthetic
  source 1..321: mol_type = other DNA
gacatccagatgacccagtctccatcctccctgtctgcatctgtaggagacagagtcaccatcacttgccaggcgagtcgggacattagcaagtatttaaattggtatcaacagaaaccagggaaagcccccaaactccagatctacgatgcatccaatttggaaacaggggtcccatcaaggttcagtggaagtggatctgggacagattttactttcaccatcagcagcctgcagcctgaagatattgcaacatattactgtcaacactatgataatatcccgatcacctttggccaggggacaagactggagattaaa

SEQ ID NO: 100 - DNA, 369 bp, synthetic construct
  misc_feature 1..369: note = Synthetic
  source 1..369: mol_type = other DNA
caggtgcagctggtgcagtctggggctgaggtgaagaagcctggggcctcagtgaaggtctcctgcaaggcttctggatacaccttcaccagttatgatatcaattgggtgcgacaggccactggacaagggcttgagtggatgggatggatgaaccctaacagtggtaactcaggctctgtaaagaagttccgggacagagtcaccatgaccaggaacacctccataagcactgcctacatggaattgagcagcctgagatctgaggacacggccgtgtattactgtgtgagacttatagggtatagcagtgcctggaagtggtccttccagcactggggccagggcaccctggtcaccgtctcctca

SEQ ID NO: 101 - protein, 107 aa, synthetic construct
  REGION 1..107: note = Synthetic
DIQMTQSPSSLSASVGDRVTITCQASRDISKYLNWYQQKPGKAPKLQIYDASNLETGVPSRFSGSGSGTDFTFTISSLQPEDIATYYCQHYDNIPITFGQGTRLEIK

SEQ ID NO: 102 - protein, 123 aa, synthetic construct
  REGION 1..123: note = Synthetic
QVQLVQSGAEVKKPGASVKVSCKASGYTFTSYDINWVRQATGQGLEWMGWMNPNSGNSGSVKKFRDRVTMTRNTSISTAYMELSSLRSEDTAVYYCVRLIGYSSAWKWSFQHWGQGTLVTVSS

SEQ ID NO: 103 - DNA, 708 bp, synthetic construct
  misc_feature 1..708: note = Synthetic
  source 1..708: mol_type = other DNA
atggacatgagggtgcccgctcagctcctggggctcctgctgctgtggctgagaggtgcgcgctgtgacatccagatgacccagtctccatcctccctgtctgcatctgtaggagacagagtcaccatcacttgccaggcgagtcaggacattaacaaccatttaaattggtatcagcagaaaccggggaaagcccctaagctcctgatctacggtgcatacactttggaaacaggggtcccatcaaggttcagtggaagtggctctgggacagattttactttcaccatcagcagcctgcagcctgaagatattgctacatattactgtcaacagtatgataagctcccgctcactttcggcggagggaccaaggtggagatcaaacgaacggtggctgcaccatctgtcttcatcttcccgccatctgatgagcagttgaaatctggaactgcctctgttgtgtgcctgctgaataacttctatcccagagaggccaaagtacagtggaaggtggataacgccctccaatcgggtaactcccaggagagtgtcacagagcaggacagcaaggacagcacctacagcctcagcagcaccctgacgctgagcaaagcagactacgagaaacacaaagtctacgcctgcgaagtcacccatcagggcctgagctcgcccgtcacaaagagcttcaacaggggagagtgt

SEQ ID NO: 104 - DNA, 1413 bp, synthetic construct
  misc_feature 1..1413: note = Synthetic
  source 1..1413: mol_type = other DNA
atggacatgagggtgcccgctcagctcctggggctcctgctgctgtggctgagaggtgcgcgctgtcaggtgcaactggtgcagtctggggctgaggtgacgaagcctggggcctcagtgaaggtctcctgcaaggcttctggatacaccttcaccagatatgatatcaactgggtgcgacaggccactggacaagggcttgagtggatgggatggatgaaccctaacagtggtaattcaggctctgtacagaaattccggggcagagtcaccatgaccaggaacacctccataaccacagtctatatggaactgagcagcctgagatctgatgacacggccgtgtattactgtgcgagaggaggaattagcagcagctggcactgggcttttgatatctggggccaagggacaatggtcaccgtctcttcagccagcaccaaggggccatccgtcttccccctggcgccctgctccaggagcacctccgagagcacagccgccctgggctgcctggtcaaggactacttccccgaaccggtgacggtgtcgtggaactcaggcgccctgaccagcggcgtgcacaccttcccggctgtcctacagtcctcaggactctactccctcagcagcgtggtgaccgtgccctccagcagcttgggcacgaagacctacacctgcaacgtagatcacaagcccagcaacaccaaggtggacaagagagttgagtccaaatatggtcccccatgcccatcatgcccagcacctgagttcctggggggaccatcagtcttcctgttccccccaaaacccaaggacactctcatgatctcccggacccctgaggtcacgtgcgtggtggtggacgtgagccaggaagaccccgaggtccagttcaactggtacgtggatggcgtggaggtgcataatgccaagacaaagccgcgggaggagcagttcaacagcacgtaccgtgtggtcagcgtcctcaccgtcctgcaccaggactggctgaacggcaaggagtacaagtgcaaggtctccaacaaaggcctcccgtcctccatcgagaaaaccatctccaaagccaaagggcagccccgagagccacaggtgtacaccctgcccccatcccaggaggagatgaccaagaaccaggtcagcctgacctgcctggtcaaaggcttctaccccagcgacatcgccgtggagtgggagagcaatgggcagccggagaacaactacaagaccacgcctcccgtgctggactccgacggctccttcttcctctacagcaggctaaccgtggacaagagcaggtggcaggaggggaatgtcttctcatgctccgtgatgcatgaggctctgcacaaccactacacacagaagagcctctccctgtctctgggcaaa

SEQ ID NO: 105 - protein, 236 aa, synthetic construct
  REGION 1..236: note = Synthetic
MDMRVPAQLLGLLLLWLRGARCDIQMTQSPSSLSASVGDRVTITCQASQDINNHLNWYQQKPGKAPKLLIYGAYTLETGVPSRFSGSGSGTDFTFTISSLQPEDIATYYCQQYDKLPLTFGGGTKVEIKRTVAAPSVFIFPPSDEQLKSGTASVVCLLNNFYPREAKVQWKVDNALQSGNSQESVTEQDSKDSTYSLSSTLTLSKADYEKHKVYACEVTHQGLSSPVTKSFNRGEC

SEQ ID NO: 106 - protein, 471 aa, synthetic construct
  REGION 1..471: note = Synthetic
MDMRVPAQLLGLLLLWLRGARCQVQLVQSGAEVTKPGASVKVSCKASGYTFTRYDINWVRQATGQGLEWMGWMNPNSGNSGSVQKFRGRVTMTRNTSITTVYMELSSLRSDDTAVYYCARGGISSSWHWAFDIWGQGTMVTVSSASTKGPSVFPLAPCSRSTSESTAALGCLVKDYFPEPVTVSWNSGALTSGVHTFPAVLQSSGLYSLSSVVTVPSSSLGTKTYTCNVDHKPSNTKVDKRVESKYGPPCPSCPAPEFLGGPSVFLFPPKPKDTLMISRTPEVTCVVVDVSQEDPEVQFNWYVDGVEVHNAKTKPREEQFNSTYRVVSVLTVLHQDWLNGKEYKCKVSNKGLPSSIEKTISKAKGQPREPQVYTLPPSQEEMTKNQVSLTCLVKGFYPSDIAVEWESNGQPENNYKTTPPVLDSDGSFFLYSRLTVDKSRWQEGNVFSCSVMHEALHNHYTQKSLSLSLGK

SEQ ID NO: 107 - DNA, 33 bp, synthetic construct
  misc_feature 1..33: note = Synthetic
  source 1..33: mol_type = other DNA
caggcgagtcaggacattaacaaccatttaaat

SEQ ID NO: 108 - DNA, 21 bp, synthetic construct
  misc_feature 1..21: note = Synthetic
  source 1..21: mol_type = other DNA
ggtgcatacactttggaaaca

SEQ ID NO: 109 - DNA, 27 bp, synthetic construct
  misc_feature 1..27: note = Synthetic
  source 1..27: mol_type = other DNA
caacagtatgataagctcccgctcact

SEQ ID NO: 110 - protein, 11 aa, synthetic construct
  REGION 1..11: note = Synthetic
QASQDINNHLN

SEQ ID NO: 111 - protein, 7 aa, synthetic construct
  REGION 1..7: note = Synthetic
GAYTLET

SEQ ID NO: 112 - protein, 9 aa, synthetic construct
  REGION 1..9: note = Synthetic
QQYDKLPLT

SEQ ID NO: 113 - DNA, 15 bp, synthetic construct
  misc_feature 1..15: note = Synthetic
  source 1..15: mol_type = other DNA
agatatgatatcaac

SEQ ID NO: 114 - DNA, 51 bp, synthetic construct
  misc_feature 1..51: note = Synthetic
  source 1..51: mol_type = other DNA
tggatgaaccctaacagtggtaattcaggctctgtacagaaattccggggc

SEQ ID NO: 115 - DNA, 39 bp, synthetic construct
  misc_feature 1..39: note = Synthetic
  source 1..39: mol_type = other DNA
ggaggaattagcagcagctggcactgggcttttgatatc

SEQ ID NO: 116 - protein, 5 aa, synthetic construct
  REGION 1..5: note = Synthetic
RYDIN

SEQ ID NO: 117 - protein, 17 aa, synthetic construct
  REGION 1..17: note = Synthetic
WMNPNSGNSGSVQKFRG

SEQ ID NO: 118 - protein, 13 aa, synthetic construct
  REGION 1..13: note = Synthetic
GGISSSWHWAFDI

SEQ ID NO: 119 - DNA, 321 bp, synthetic construct
  misc_feature 1..321: note = Synthetic
  source 1..321: mol_type = other DNA
gacatccagatgacccagtctccatcctccctgtctgcatctgtaggagacagagtcaccatcacttgccaggcgagtcaggacattaacaaccatttaaattggtatcagcagaaaccggggaaagcccctaagctcctgatctacggtgcatacactttggaaacaggggtcccatcaaggttcagtggaagtggctctgggacagattttactttcaccatcagcagcctgcagcctgaagatattgctacatattactgtcaacagtatgataagctcccgctcactttcggcggagggaccaaggtggagatcaaa

SEQ ID NO: 120 - DNA, 366 bp, synthetic construct
  misc_feature 1..366: note = Synthetic
  source 1..366: mol_type = other DNA
caggtgcaactggtgcagtctggggctgaggtgacgaagcctggggcctcagtgaaggtctcctgcaaggcttctggatacaccttcaccagatatgatatcaactgggtgcgacaggccactggacaagggcttgagtggatgggatggatgaaccctaacagtggtaattcaggctctgtacagaaattccggggcagagtcaccatgaccaggaacacctccataaccacagtctatatggaactgagcagcctgagatctgatgacacggccgtgtattactgtgcgagaggaggaattagcagcagctggcactgggcttttgatatctggggccaagggacaatggtcaccgtctcttca

SEQ ID NO: 121 - protein, 107 aa, synthetic construct
  REGION 1..107: note = Synthetic
DIQMTQSPSSLSASVGDRVTITCQASQDINNHLNWYQQKPGKAPKLLIYGAYTLETGVPSRFSGSGSGTDFTFTISSLQPEDIATYYCQQYDKLPLTFGGGTKVEIK

SEQ ID NO: 122 - protein, 122 aa, synthetic construct
  REGION 1..122: note = Synthetic
QVQLVQSGAEVTKPGASVKVSCKASGYTFTRYDINWVRQATGQGLEWMGWMNPNSGNSGSVQKFRGRVTMTRNTSITTVYMELSSLRSDDTAVYYCARGGISSSWHWAFDIWGQGTMVTVSS

SEQ ID NO: 123 - DNA, 708 bp, synthetic construct
  misc_feature 1..708: note = Synthetic
  source 1..708: mol_type = other DNA
atggacatgagggtgcccgctcagctcctggggctcctgctgctgtggctgagaggtgcgcgctgtgacatccagatgacccagtctccatcttccctgtctgcatctgtaggagacagagtcaccatcacttgccgggcaagtcagagcattagcagcaatttaaattggtatcagcagaaaccagggaaagcccctaagctcctgatctctgctgcatccaatttgcaaagtggggtcccatcaaggttcagtggcagtgaatctgggacagatttcactctcaccatcagcagtctacaatctgaagattttgcaacttactactgtcaacagagtgacagtctcccgctcactttcggcggagggaccaaggtggagatcaatcgaacggtggctgcaccatctgtcttcatcttcccgccatctgatgagcagttgaaatctggaactgcctctgttgtgtgcctgctgaataacttctatcccagagaggccaaagtacagtggaaggtggataacgccctccaatcgggtaactcccaggagagtgtcacagagcaggacagcaaggacagcacctacagcctcagcagcaccctgacgctgagcaaagcagactacgagaaacacaaagtctacgcctgcgaagtcacccatcagggcctgagctcgcccgtcacaaagagcttcaacaggggagagtgt

SEQ ID NO: 124 - DNA, 1404 bp, synthetic construct
  misc_feature 1..1404: note = Synthetic
  source 1..1404: mol_type = other DNA
atggacatgagggtgcccgctcagctcctggggctcctgctgctgtggctgagaggtgcgcgctgtgaggtgcagctgttggagtctgggggaggcttggtacagcctggggggtccctgagactctcctgtgcagcctctggattcacctttagcagctatgccatgacctgggtccgccaggctccagggagggggctgcagtgggtctcaactattagtggtagtggtagtaacacatactacgcagactccgtgaagggccggttcaccatctccagagacaattccaagaacacgctgtatctgcaaatgagcagcctgagagccgaggacacggccgtatattactgtgcgaaagaggggggcagtaaccgatacttccaccactggggccagggcaccctggtcaccatctcctcagccagcaccaaggggccatccgtcttccccctggcgccctgctccaggagcacctccgagagcacagccgccctgggctgcctggtcaaggactacttccccgaaccggtgacggtgtcgtggaactcaggcgccctgaccagcggcgtgcacaccttcccggctgtcctacagtcctcaggactctactccctcagcagcgtggtgaccgtgccctccagcagcttgggcacgaagacctacacctgcaacgtagatcacaagcccagcaacaccaaggtggacaagagagttgagtccaaatatggtcccccatgcccatcatgcccagcacctgagttcctggggggaccatcagtcttcctgttccccccaaaacccaaggacactctcatgatctcccggacccctgaggtcacgtgcgtggtggtggacgtgagccaggaagaccccgaggtccagttcaactggtacgtggatggcgtggaggtgcataatgccaagacaaagccgcgggaggagcagttcaacagcacgtaccgtgtggtcagcgtcctcaccgtcctgcaccaggactggctgaacggcaaggagtacaagtgcaaggtctccaacaaaggcctcccgtcctccatcgagaaaaccatctccaaagccaaagggcagccccgagagccacaggtgtacaccctgcccccatcccaggaggagatgaccaagaaccaggtcagcctgacctgcctggtcaaaggcttctaccccagcgacatcgccgtggagtgggagagcaatgggcagccggagaacaactacaagaccacgcctcccgtgctggactccgacggctccttcttcctctacagcaggctaaccgtggacaagagcaggtggcaggaggggaatgtcttctcatgctccgtgatgcatgaggctctgcacaaccactacacacagaagagcctctccctgtctctgggcaaa

SEQ ID NO: 125 - protein, 236 aa, synthetic construct
  REGION 1..236: note = Synthetic
MDMRVPAQLLGLLLLWLRGARCDIQMTQSPSSLSASVGDRVTITCRASQSISSNLNWYQQKPGKAPKLLISAASNLQSGVPSRFSGSESGTDFTLTISSLQSEDFATYYCQQSDSLPLTFGGGTKVEINRTVAAPSVFIFPPSDEQLKSGTASVVCLLNNFYPREAKVQWKVDNALQSGNSQESVTEQDSKDSTYSLSSTLTLSKADYEKHKVYACEVTHQGLSSPVTKSFNRGEC

SEQ ID NO: 126 - protein, 468 aa, synthetic construct
  REGION 1..468: note = Synthetic
MDMRVPAQLLGLLLLWLRGARCEVQLLESGGGLVQPGGSLRLSCAASGFTFSSYAMTWVRQAPGRGLQWVSTISGSGSNTYYADSVKGRFTISRDNSKNTLYLQMSSLRAEDTAVYYCAKEGGSNRYFHHWGQGTLVTISSASTKGPSVFPLAPCSRSTSESTAALGCLVKDYFPEPVTVSWNSGALTSGVHTFPAVLQSSGLYSLSSVVTVPSSSLGTKTYTCNVDHKPSNTKVDKRVESKYGPPCPSCPAPEFLGGPSVFLFPPKPKDTLMISRTPEVTCVVVDVSQEDPEVQFNWYVDGVEVHNAKTKPREEQFNSTYRVVSVLTVLHQDWLNGKEYKCKVSNKGLPSSIEKTISKAKGQPREPQVYTLPPSQEEMTKNQVSLTCLVKGFYPSDIAVEWESNGQPENNYKTTPPVLDSDGSFFLYSRLTVDKSRWQEGNVFSCSVMHEALHNHYTQKSLSLSLGK

SEQ ID NO: 127 - DNA, 33 bp, synthetic construct
  misc_feature 1..33: note = Synthetic
  source 1..33: mol_type = other DNA
cgggcaagtcagagcattagcagcaatttaaat

SEQ ID NO: 128 - DNA, 21 bp, synthetic construct
  misc_feature 1..21: note = Synthetic
  source 1..21: mol_type = other DNA
gctgcatccaatttgcaaagt

SEQ ID NO: 129 - DNA, 27 bp, synthetic construct
  misc_feature 1..27: note = Synthetic
  source 1..27: mol_type = other DNA
caacagagtgacagtctcccgctcact

SEQ ID NO: 130 - protein, 11 aa, synthetic construct
  REGION 1..11: note = Synthetic
RASQSISSNLN

SEQ ID NO: 131 - protein, 7 aa, synthetic construct
  REGION 1..7: note = Synthetic
AASNLQS

SEQ ID NO: 132 - protein, 9 aa, synthetic construct
  REGION 1..9: note = Synthetic
QQSDSLPLT

SEQ ID NO: 133 - DNA, 15 bp, synthetic construct
  misc_feature 1..15: note = Synthetic
  source 1..15: mol_type = other DNA
agctatgccatgacc

SEQ ID NO: 134 - DNA, 51 bp, synthetic construct
  misc_feature 1..51: note = Synthetic
  source 1..51: mol_type = other DNA
actattagtggtagtggtagtaacacatactacgcagactccgtgaagggc

SEQ ID NO: 135 - DNA, 30 bp, synthetic construct
  misc_feature 1..30: note = Synthetic
  source 1..30: mol_type = other DNA
gaggggggcagtaaccgatacttccaccac

SEQ ID NO: 136 - protein, 5 aa, synthetic construct
  REGION 1..5: note = Synthetic
SYAMT

SEQ ID NO: 137 - protein, 17 aa, synthetic construct
  REGION 1..17: note = Synthetic
TISGSGSNTYYADSVKG

SEQ ID NO: 138 - protein, 10 aa, synthetic construct
  REGION 1..10: note = Synthetic
EGGSNRYFHH

SEQ ID NO: 139 - DNA, 321 bp, synthetic construct
  misc_feature 1..321: note = Synthetic
  source 1..321: mol_type = other DNA
gacatccagatgacccagtctccatcttccctgtctgcatctgtaggagacagagtcaccatcacttgccgggcaagtcagagcattagcagcaatttaaattggtatcagcagaaaccagggaaagcccctaagctcctgatctctgctgcatccaatttgcaaagtggggtcccatcaaggttcagtggcagtgaatctgggacagatttcactctcaccatcagcagtctacaatctgaagattttgcaacttactactgtcaacagagtgacagtctcccgctcactttcggcggagggaccaaggtggagatcaat

SEQ ID NO: 140 - DNA, 357 bp, synthetic construct
  misc_feature 1..357: note = Synthetic
  source 1..357: mol_type = other DNA
gaggtgcagctgttggagtctgggggaggcttggtacagcctggggggtccctgagactctcctgtgcagcctctggattcacctttagcagctatgccatgacctgggtccgccaggctccagggagggggctgcagtgggtctcaactattagtggtagtggtagtaacacatactacgcagactccgtgaagggccggttcaccatctccagagacaattccaagaacacgctgtatctgcaaatgagcagcctgagagccgaggacacggccgtatattactgtgcgaaagaggggggcagtaaccgatacttccaccactggggccagggcaccctggtcaccatctcctca

SEQ ID NO: 141 - protein, 107 aa, synthetic construct
  REGION 1..107: note = Synthetic
DIQMTQSPSSLSASVGDRVTITCRASQSISSNLNWYQQKPGKAPKLLISAASNLQSGVPSRFSGSESGTDFTLTISSLQSEDFATYYCQQSDSLPLTFGGGTKVEIN

SEQ ID NO: 142 - protein, 119 aa, synthetic construct
  REGION 1..119: note = Synthetic
EVQLLESGGGLVQPGGSLRLSCAASGFTFSSYAMTWVRQAPGRGLQWVSTISGSGSNTYYADSVKGRFTISRDNSKNTLYLQMSSLRAEDTAVYYCAKEGGSNRYFHHWGQGTLVTISS

SEQ ID NO: 143 - DNA, 708 bp, synthetic construct
  misc_feature 1..708: note = Synthetic
  source 1..708: mol_type = other DNA
atggacatgagggtgcccgctcagctcctggggctcctgctgctgtggctgagaggtgcgcgctgtgacatccagatgacccagtctccatcctccctgtctgcatctgtaggagacagagtcaccatcacttgccaggcgagtcaggacattaacaaccatttaaattggtatcagcagaaaccagggaaagcccctaagctcctgatctacgatgtatccaatttggaaacaggggtcccatcaagtttcagtggaagtggatgtgggacagattttactttcaccatcagcagcctgcagcctgaagatatcgcaacatatttctgtcaacagtatgataaactcccgctcacttttggcggagggaccaaggtggagatcgaaggaacggtggctgcaccatctgtcttcatcttcccgccatctgatgagcagttgaaatctggaactgcctctgttgtgtgcctgctgaataacttctatcccagagaggccaaagtacagtggaaggtggataacgccctccaatcgggtaactcccaggagagtgtcacagagcaggacagcaaggacagcacctacagcctcagcagcaccctgacgctgagcaaagcagactacgagaaacacaaagtctacgcctgcgaagtcacccatcagggcctgagctcgcccgtcacaaagagcttcaacaggggagagtgt

SEQ ID NO: 144 - DNA, 1413 bp, synthetic construct
  misc_feature 1..1413: note = Synthetic
  source 1..1413: mol_type = other DNA
atggacatgagggtgcccgctcagctcctggggctcctgctgctgtggctgagaggtgcgcgctgtcaggtgcagctggtgcagtctggggctgaggtgaagaagcctggggcctcagtgaaggtctcctgcaaggcttctggatacaccttcacccgttatgatatcaactgggtgcgacaggccactggacaagggcttgagtggatgggatggctgaaccctaatagtggtaacacaggccagacacagaagttccggggcagagtcaccatgaccaggaacacctccataaatacagcctacatggagctgagcagcctgagatctgaggacacggccgtgtattactgtgcgagaggggggtataccagtgcctggagatggtacttcgatctctggggccgtggcaccctggtcactgtctcctcagccagcaccaaggggccatccgtcttccccctggcgccctgctccaggagcacctccgagagcacagccgccctgggctgcctggtcaaggactacttccccgaaccggtgacggtgtcgtggaactcaggcgccctgaccagcggcgtgcacaccttcccggctgtcctacagtcctcaggactctactccctcagcagcgtggtgaccgtgccctccagcagcttgggcacgaagacctacacctgcaacgtagatcacaagcccagcaacaccaaggtggacaagagagttgagtccaaatatggtcccccatgcccatcatgcccagcacctgagttcctggggggaccatcagtcttcctgttccccccaaaacccaaggacactctcatgatctcccggacccctgaggtcacgtgcgtggtggtggacgtgagccaggaagaccccgaggtccagttcaactggtacgtggatggcgtggaggtgcataatgccaagacaaagccgcgggaggagcagttcaacagcacgtaccgtgtggtcagcgtcctcaccgtcctgcaccaggactggctgaacggcaaggagtacaagtgcaaggtctccaacaaaggcctcccgtcctccatcgagaaaaccatctccaaagccaaagggcagccccgagagccacaggtgtacaccctgcccccatcccaggaggagatgaccaagaaccaggtcagcctgacctgcctggtcaaaggcttctaccccagcgacatcgccgtggagtgggagagcaatgggcagccggagaacaactacaagaccacgcctcccgtgctggactccgacggctccttcttcctctacagcaggctaaccgtggacaagagcaggtggcaggaggggaatgtcttctcatgctccgtgatgcatgaggctctgcacaaccactacacacagaagagcctctccctgtctctgggcaaa

SEQ ID NO: 145 - protein, 236 aa, synthetic construct
  REGION 1..236: note = Synthetic
MDMRVPAQLLGLLLLWLRGARCDIQMTQSPSSLSASVGDRVTITCQASQDINNHLNWYQQKPGKAPKLLIYDVSNLETGVPSSFSGSGCGTDFTFTISSLQPEDIATYFCQQYDKLPLTFGGGTKVEIEGTVAAPSVFIFPPSDEQLKSGTASVVCLLNNFYPREAKVQWKVDNALQSGNSQESVTEQDSKDSTYSLSSTLTLSKADYEKHKVYACEVTHQGLSSPVTKSFNRGEC

SEQ ID NO: 146 - protein, 471 aa, synthetic construct
  REGION 1..471: note = Synthetic
MDMRVPAQLLGLLLLWLRGARCQVQLVQSGAEVKKPGASVKVSCKASGYTFTRYDINWVRQATGQGLEWMGWLNPNSGNTGQTQKFRGRVTMTRNTSINTAYMELSSLRSEDTAVYYCARGGYTSAWRWYFDLWGRGTLVTVSSASTKGPSVFPLAPCSRSTSESTAALGCLVKDYFPEPVTVSWNSGALTSGVHTFPAVLQSSGLYSLSSVVTVPSSSLGTKTYTCNVDHKPSNTKVDKRVESKYGPPCPSCPAPEFLGGPSVFLFPPKPKDTLMISRTPEVTCVVVDVSQEDPEVQFNWYVDGVEVHNAKTKPREEQFNSTYRVVSVLTVLHQDWLNGKEYKCKVSNKGLPSSIEKTISKAKGQPREPQVYTLPPSQEEMTKNQVSLTCLVKGFYPSDIAVEWESNGQPENNYKTTPPVLDSDGSFFLYSRLTVDKSRWQEGNVFSCSVMHEALHNHYTQKSLSLSLGK

SEQ ID NO: 147 - DNA, 33 bp, synthetic construct; identical to SEQ ID NO: 107
  misc_feature 1..33: note = Synthetic
  source 1..33: mol_type = other DNA

SEQ ID NO: 148 - DNA, 21 bp, synthetic construct
  misc_feature 1..21: note = Synthetic
  source 1..21: mol_type = other DNA
gatgtatccaatttggaaaca

SEQ ID NO: 149 - DNA, 27 bp, synthetic construct
  misc_feature 1..27: note = Synthetic
  source 1..27: mol_type = other DNA
caacagtatgataaactcccgctcact

SEQ ID NO: 150 - protein, 11 aa, synthetic construct
  REGION 1..11: note = Synthetic
QASQDINNHLN

SEQ ID NO: 151 - protein, 7 aa, synthetic construct
  REGION 1..7: note = Synthetic
DVSNLET

SEQ ID NO: 152 - protein, 9 aa, synthetic construct
  REGION 1..9: note = Synthetic
QQYDKLPLT

SEQ ID NO: 153 - DNA, 15 bp, synthetic construct
  misc_feature 1..15: note = Synthetic
  source 1..15: mol_type = other DNA
cgttatgatatcaac

SEQ ID NO: 154 - DNA, 51 bp, synthetic construct
  misc_feature 1..51: note = Synthetic
  source 1..51: mol_type = other DNA
tggctgaaccctaatagtggtaacacaggccagacacagaagttccggggc

SEQ ID NO: 155 - DNA, 39 bp, synthetic construct
  misc_feature 1..39: note = Synthetic
  source 1..39: mol_type = other DNA
ggggggtataccagtgcctggagatggtacttcgatctc

SEQ ID NO: 156 - protein, 5 aa, synthetic construct
  REGION 1..5: note = Synthetic
RYDIN

SEQ ID NO: 157 - protein, 17 aa, synthetic construct
  REGION 1..17: note = Synthetic
WLNPNSGNTGQTQKFRG

SEQ ID NO: 158 - protein, 13 aa, synthetic construct
  REGION 1..13: note = Synthetic
GGYTSAWRWYFDL

SEQ ID NO: 159 - DNA, 321 bp, synthetic construct
  misc_feature 1..321: note = Synthetic
  source 1..321: mol_type = other DNA
gacatccagatgacccagtctccatcctccctgtctgcatctgtaggagacagagtcaccatcacttgccaggcgagtcaggacattaacaaccatttaaattggtatcagcagaaaccagggaaagcccctaagctcctgatctacgatgtatccaatttggaaacaggggtcccatcaagtttcagtggaagtggatgtgggacagattttactttcaccatcagcagcctgcagcctgaagatatcgcaacatatttctgtcaacagtatgataaactcccgctcacttttggcggagggaccaaggtggagatcgaa

SEQ ID NO: 160 - DNA, 366 bp, synthetic construct
  misc_feature 1..366: note = Synthetic
  source 1..366: mol_type = other DNA
caggtgcagctggtgcagtctggggctgaggtgaagaagcctggggcctcagtgaaggtctcctgcaaggcttctggatacaccttcacccgttatgatatcaactgggtgcgacaggccactggacaagggcttgagtggatgggatggctgaaccctaatagtggtaacacaggccagacacagaagttccggggcagagtcaccatgaccaggaacacctccataaatacagcctacatggagctgagcagcctgagatctgaggacacggccgtgtattactgtgcgagaggggggtataccagtgcctggagatggtacttcgatctctggggccgtggcaccctggtcactgtctcctca

SEQ ID NO: 161 - protein, 107 aa, synthetic construct
  REGION 1..107: note = Synthetic
DIQMTQSPSSLSASVGDRVTITCQASQDINNHLNWYQQKPGKAPKLLIYDVSNLETGVPSSFSGSGCGTDFTFTISSLQPEDIATYFCQQYDKLPLTFGGGTKVEIE

SEQ ID NO: 162 - protein, 122 aa, synthetic construct
  REGION 1..122: note = Synthetic
QVQLVQSGAEVKKPGASVKVSCKASGYTFTRYDINWVRQATGQGLEWMGWLNPNSGNTGQTQKFRGRVTMTRNTSINTAYMELSSLRSEDTAVYYCARGGYTSAWRWYFDLWGRGTLVTVSS

SEQ ID NO: 163 - DNA, 708 bp, synthetic construct
  misc_feature 1..708: note = Synthetic
  source 1..708: mol_type = other DNA
atggacatgagggtgcccgctcagctcctggggctcctgctgctgtggctgagaggtgcgcgctgtgacatccagatgacccagtctccatcttccgtgtctgcatctgtaggagacagagtcaccatcacttgtcgggcgagtcagggtattcgcaagtggttagcctggtatcagcagaaaccagggagggcccctaagctcctgatctatgctgcatcccgtttgcaaagtggggtcccatcaaggttcagcggcagtggatctgggacagatttcactctcaccatcagcagcctgcggcctgaagattttgcaacttactattgtcttcaggctcacggtttcccgtggacgttcggccaagggaccaaggtggaaatcaaacgaacggtggctgcaccatctgtcttcatcttcccgccatctgatgagcagttgaaatctggaactgcctctgttgtgtgcctgctgaataacttctatcccagagaggccaaagtacagtggaaggtggataacgccctccaatcgggtaactcccaggagagtgtcacagagcaggacagcaaggacagcacctacagcctcagcagcaccctgacgctgagcaaagcagactacgagaaacacaaagtctacgcctgcgaagtcacccatcagggcctgagctcgcccgtcacaaagagcttcaacaggggagagtgt

SEQ ID NO: 164 - DNA, 1395 bp, synthetic construct
  misc_feature 1..1395: note = Synthetic
  source 1..1395: mol_type = other DNA
atggacatgagggtgcccgctcagctcctggggctcctgctgctgtggctgagaggtgcgcgctgtgaggtgcagctggtggagtctgggggaggcttggtccagccgggggggtccctgagactctcctgtgcagcctctggattcacctttagtagctattggatgagctgggtccgccaggctccagggaaggggctggagtgggtggccaacataaagcaagatggaagtgaggaatattatgtggactctgtgaagggccgattcaccatctccagagacaacgccaagaactcactgtttctgcaaatgaacagcctgagagccgaggacacggctgtgtattactgtgcgagagactacggtgactcctttgactactggggccagggaaccctggtcaccgtctcctcagcctccaccaagggcccatcggtcttccccctggcgccctgctccaggagcacctccgagagcacagcggccctgggctgcctggtcaaggactacttccccgaaccggtgacggtgtcgtggaactcaggcgctctgaccagcggcgtgcacaccttcccagctgtcctacagtcctcaggactctactccctcagcagcgtggtgaccgtgccctccagcaacttcggcacccagacctacacctgcaacgtagatcacaagcccagcaacaccaaggtggacaagacagttgagcgcaaatgttgtgtcgagtgcccaccgtgcccagcaccacctgtggcaggaccgtcagtcttcctcttccccccaaaacccaaggacaccctcatgatctcccggacccctgaggtcacgtgcgtggtggtggacgtgagccacgaagaccccgaggtccagttcaactggtacgtggacggcgtggaggtgcataatgccaagacaaagccacgggaggagcagttcaacagcacgttccgtgtggtcagcgtcctcaccgttgtgcaccaggactggctgaacggcaaggagtacaagtgcaaggtctccaacaaaggcctcccagcccccatcgagaaaaccatctccaaaaccaaagggcagccccgagaaccacaggtgtacaccctgcccccatcccgggaggagatgaccaagaaccaggtcagcctgacctgcctggtcaaaggcttctaccccagcgacatcgccgtggagtgggagagcaatgggcagccggagaacaactacaagaccacacctcccatgctggactccgacggctccttcttcctctacagcaagctcaccgtggacaagagcaggtggcagcaggggaacgtcttctcatgctccgtgatgcatgaggctctgcacaaccactacacgcagaagagcctctccctgtctccgggcaaa

SEQ ID NO: 165 - protein, 236 aa, synthetic construct
  REGION 1..236: note = Synthetic
MDMRVPAQLLGLLLLWLRGARCDIQMTQSPSSVSASVGDRVTITCRASQGIRKWLAWYQQKPGRAPKLLIYAASRLQSGVPSRFSGSGSGTDFTLTISSLRPEDFATYYCLQAHGFPWTFGQGTKVEIKRTVAAPSVFIFPPSDEQLKSGTASVVCLLNNFYPREAKVQWKVDNALQSGNSQESVTEQDSKDSTYSLSSTLTLSKADYEKHKVYACEVTHQGLSSPVTKSFNRGEC

SEQ ID NO: 166 - protein, 465 aa, synthetic construct
  REGION 1..465: note = Synthetic
MDMRVPAQLLGLLLLWLRGARCEVQLVESGGGLVQPGGSLRLSCAASGFTFSSYWMSWVRQAPGKGLEWVANIKQDGSEEYYVDSVKGRFTISRDNAKNSLFLQMNSLRAEDTAVYYCARDYGDSFDYWGQGTLVTVSSASTKGPSVFPLAPCSRSTSESTAALGCLVKDYFPEPVTVSWNSGALTSGVHTFPAVLQSSGLYSLSSVVTVPSSNFGTQTYTCNVDHKPSNTKVDKTVERKCCVECPPCPAPPVAGPSVFLFPPKPKDTLMISRTPEVTCVVVDVSHEDPEVQFNWYVDGVEVHNAKTKPREEQFNSTFRVVSVLTVVHQDWLNGKEYKCKVSNKGLPAPIEKTISKTKGQPREPQVYTLPPSREEMTKNQVSLTCLVKGFYPSDIAVEWESNGQPENNYKTTPPMLDSDGSFFLYSKLTVDKSRWQQGNVFSCSVMHEALHNHYTQKSLSLSPGK

SEQ ID NO: 167 - DNA, 33 bp, synthetic construct
  misc_feature 1..33: note = Synthetic
  source 1..33: mol_type = other DNA
cgggcgagtcagggtattcgcaagtggttagcc

SEQ ID NO: 168 - DNA, 21 bp, synthetic construct
  misc_feature 1..21: note = Synthetic
  source 1..21: mol_type = other DNA
gctgcatcccgtttgcaaagt

SEQ ID NO: 169 - DNA, 27 bp, synthetic construct
  misc_feature 1..27: note = Synthetic
  source 1..27: mol_type = other DNA
cttcaggctcacggtttcccgtggacg

SEQ ID NO: 170 - protein, 11 aa, synthetic construct
  REGION 1..11: note = Synthetic
RASQGIRKWLA

SEQ ID NO: 171 - protein, 7 aa, synthetic construct
  REGION 1..7: note = Synthetic
AASRLQS

SEQ ID NO: 172 - protein, 9 aa, synthetic construct
  REGION 1..9: note = Synthetic
LQAHGFPWT

SEQ ID NO: 173 - DNA, 15 bp, synthetic construct
  misc_feature 1..15: note = Synthetic
  source 1..15: mol_type = other DNA
agctattggatgagc

SEQ ID NO: 174 - DNA, 51 bp, synthetic construct
  misc_feature 1..51: note = Synthetic
  source 1..51: mol_type = other DNA
aacataaagcaagatggaagtgaggaatattatgtggactctgtgaagggc

SEQ ID NO: 175 - DNA, 24 bp, synthetic construct
  misc_feature 1..24: note = Synthetic
  source 1..24: mol_type = other DNA
gactacggtgactcctttgactac

SEQ ID NO: 176 - protein, 5 aa, synthetic construct
  REGION 1..5: note = Synthetic
SYWMS

SEQ ID NO: 177 - protein, 17 aa, synthetic construct
  REGION 1..17: note = Synthetic
NIKQDGSEEYYVDSVKG

SEQ ID NO: 178 - protein, 8 aa, synthetic construct
  REGION 1..8: note = Synthetic
DYGDSFDY

SEQ ID NO: 179 - DNA, 321 bp, synthetic construct
  misc_feature 1..321: note = Synthetic
  source 1..321: mol_type = other DNA
gacatccagatgacccagtctccatcttccgtgtctgcatctgtaggagacagagtcaccatcacttgtcgggcgagtcagggtattcgcaagtggttagcctggtatcagcagaaaccagggagggcccctaagctcctgatctatgctgcatcccgtttgcaaagtggggtcccatcaaggttcagcggcagtggatctgggacagatttcactctcaccatcagcagcctgcggcctgaagattttgcaacttactattgtcttcaggctcacggtttcccgtggacgttcggccaagggaccaaggtggaaatcaaa

SEQ ID NO: 180 - DNA, 351 bp, synthetic construct
  misc_feature 1..351: note = Synthetic
  source 1..351: mol_type = other DNA
gaggtgcagctggtggagtctgggggaggcttggtccagccgggggggtccctgagactctcctgtgcagcctctggattcacctttagtagctattggatgagctgggtccgccaggctccagggaaggggctggagtgggtggccaacataaagcaagatggaagtgaggaatattatgtggactctgtgaagggccgattcaccatctccagagacaacgccaagaactcactgtttctgcaaatgaacagcctgagagccgaggacacggctgtgtattactgtgcgagagactacggtgactcctttgactactggggccagggaaccctggtcaccgtctcctca

SEQ ID NO: 181 - protein, 107 aa, synthetic construct
  REGION 1..107: note = Synthetic
DIQMTQSPSSVSASVGDRVTITCRASQGIRKWLAWYQQKPGRAPKLLIYAASRLQSGVPSRFSGSGSGTDFTLTISSLRPEDFATYYCLQAHGFPWTFGQGTKVEIK

SEQ ID NO: 182 - protein, 117 aa, synthetic construct
  REGION 1..117: note = Synthetic
EVQLVESGGGLVQPGGSLRLSCAASGFTFSSYWMSWVRQAPGKGLEWVANIKQDGSEEYYVDSVKGRFTISRDNAKNSLFLQMNSLRAEDTAVYYCARDYGDSFDYWGQGTLVTVSS

SEQ ID NO: 183 - DNA, 708 bp, synthetic construct
  misc_feature 1..708: note = Synthetic
  source 1..708: mol_type = other DNA
atggacatgagggtgcccgctcagctcctggggctcctgctgctgtggctgagaggtgcgcgctgtgaaatagtgatgacgcagtctccagccaccctgtctgtgtctccaggggaaagagccaccctctcctgcagggccagtcagagtgttagcagcaacttagcctggtatcagcagaaatctggccaggctcccaggctcctcatctatggtgcatccatcagggccactggtatcccagccagggtcagcggcagtgggtctgggacagagttcaccttcactatcagcagcctgcagtctgaagattttgcagtctattactgtcagcagtataagaactggcctctcactctcggcggagggaccaaggtggagatcaaacgaacggtggctgcaccatctgtcttcatcttcccgccatctgatgagcagttgaaatctggaactgcctctgttgtgtgcctgctgaataacttctatcccagagaggccaaagtacagtggaaggtggataacgccctccaatcgggtaactcccaggagagtgtcacagagcaggacagcaaggacagcacctacagcctcagcagcaccctgacgctgagcaaagcagactacgagaaacacaaagtctacgcctgcgaagtcacccatcagggcctgagctcgcccgtcacaaagagcttcaacaggggagagtgt

SEQ ID NO: 184 - DNA, 1392 bp, synthetic construct
  misc_feature 1..1392: note = Synthetic
  source 1..1392: mol_type = other DNA
atggacatgagggtgcccgctcagctcctggggctcctgctgctgtggctgagaggtgcgcgctgtgaggtgcagctggtggagtctgggggaggcttggtccagcctggggggtccctgagactctcctgtgcagcctctggattcacctttagcagcaattggatgagctgggtccgccaggctccagggaaggggctggactggatggccagcatgaagcaagatggaagtgagatatactatgtggactctgtgaagggccgattcaccatctccagagacaacgccaagaactcactgcatctgcaaatgaacagcctgagagccgaggacacggctgtgtattactgtgtgagaggagggtggagatttgagtcctggggccagggagccctggtcaccgtctcctcagcctccaccaagggcccatcggtcttccccctggcgccctgctccaggagcacctccgagagcacagcggccctgggctgcctggtcaaggactacttccccgaaccggtgacggtgtcgtggaactcaggcgctctgaccagcggcgtgcacaccttcccagctgtcctacagtcctcaggactctactccctcagcagcgtggtgaccgtgccctccagcaacttcggcacccagacctacacctgcaacgtagatcacaagcccagcaacaccaaggtggacaagacagttgagcgcaaatgttgtgtcgagtgcccaccgtgcccagcaccacctgtggcaggaccgtcagtcttcctcttccccccaaaacccaaggacaccctcatgatctcccggacccctgaggtcacgtgcgtggtggtggacgtgagccacgaagaccccgaggtccagttcaactggtacgtggacggcgtggaggtgcataatgccaagacaaagccacgggaggagcagttcaacagcacgttccgtgtggtcagcgtcctcaccgttgtgcaccaggactggctgaacggcaaggagtacaagtgcaaggtctccaacaaaggcctcccagcccccatcgagaaaaccatctccaaaaccaaagggcagccccgagaaccacaggtgtacaccctgcccccatcccgggaggagatgaccaagaaccaggtcagcctgacctgcctggtcaaaggcttctaccccagcgacatcgccgtggagtgggagagcaatgggcagccggagaacaactacaagaccacacctcccatgctggactccgacggctccttcttcctctacagcaagctcaccgtggacaagagcaggtggcagcaggggaacgtcttctcatgctccgtgatgcatgaggctctgcacaaccactacacgcagaagagcctctccctgtctccgggcaaa

SEQ ID NO: 185 - protein, 236 aa, synthetic construct
  REGION 1..236: note = Synthetic
MDMRVPAQLLGLLLLWLRGARCEIVMTQSPATLSVSPGERATLSCRASQSVSSNLAWYQQKSGQAPRLLIYGASIRATGIPARVSGSGSGTEFTFTISSLQSEDFAVYYCQQYKNWPLTLGGGTKVEIKRTVAAPSVFIFPPSDEQLKSGTASVVCLLNNFYPREAKVQWKVDNALQSGNSQESVTEQDSKDSTYSLSSTLTLSKADYEKHKVYACEVTHQGLSSPVTKSFNRGEC

SEQ ID NO: 186 - protein, 464 aa, synthetic construct
  REGION 1..464: note = Synthetic
MDMRVPAQLLGLLLLWLRGARCEVQLVESGGGLVQPGGSLRLSCAASGFTFSSNWMSWVRQAPGKGLDWMASMKQDGSEIYYVDSVKGRFTISRDNAKNSLHLQMNSLRAEDTAVYYCVRGGWRFESWGQGALVTVSSASTKGPSVFPLAPCSRSTSESTAALGCLVKDYFPEPVTVSWNSGALTSGVHTFPAVLQSSGLYSLSSVVTVPSSNFGTQTYTCNVDHKPSNTKVDKTVERKCCVECPPCPAPPVAGPSVFLFPPKPKDTLMISRTPEVTCVVVDVSHEDPEVQFNWYVDGVEVHNAKTKPREEQFNSTFRVVSVLTVVHQDWLNGKEYKCKVSNKGLPAPIEKTISKTKGQPREPQVYTLPPSREEMTKNQVSLTCLVKGFYPSDIAVEWESNGQPENNYKTTPPMLDSDGSFFLYSKLTVDKSRWQQGNVFSCSVMHEALHNHYTQKSLSLSPGK

SEQ ID NO: 187 - DNA, 33 bp, synthetic construct
  misc_feature 1..33: note = Synthetic
  source 1..33: mol_type = other DNA
agggccagtcagagtgttagcagcaacttagcc

SEQ ID NO: 188 - DNA, 21 bp, synthetic construct
  misc_feature 1..21: note = Synthetic
  source 1..21: mol_type = other DNA
ggtgcatccatcagggccact

SEQ ID NO: 189 - DNA, 27 bp, synthetic construct
  misc_feature 1..27: note = Synthetic
  source 1..27: mol_type = other DNA
cagcagtataagaactggcctctcact

SEQ ID NO: 190 - protein, 11 aa, synthetic construct
  REGION 1..11: note = Synthetic
RASQSVSSNLA

SEQ ID NO: 191 - protein, 7 aa, synthetic construct
  REGION 1..7: note = Synthetic
GASIRAT

SEQ ID NO: 192 - protein, 9 aa, synthetic construct
  REGION 1..9: note = Synthetic
QQYKNWPLT

SEQ ID NO: 193 - DNA, 15 bp, synthetic construct
  misc_feature 1..15: note = Synthetic
  source 1..15: mol_type = other DNA
agcaattggatgagc

SEQ ID NO: 194 - DNA, 51 bp, synthetic construct
  misc_feature 1..51: note = Synthetic
  source 1..51: mol_type = other DNA
agcatgaagcaagatggaagtgagatatactatgtggactctgtgaagggc

SEQ ID NO: 195 - DNA, 21 bp, synthetic construct
  misc_feature 1..21: note = Synthetic
  source 1..21: mol_type = other DNA
ggagggtggagatttgagtcc

SEQ ID NO: 196 - protein, 5 aa, synthetic construct
  REGION 1..5: note = Synthetic
SNWMS

SEQ ID NO: 197 - protein, 17 aa, synthetic construct
  REGION 1..17: note = Synthetic
SMKQDGSEIYYVDSVKG

SEQ ID NO: 198 - protein, 7 aa, synthetic construct
  REGION 1..7: note = Synthetic
GGWRFES

SEQ ID NO: 199 - DNA, 321 bp, synthetic construct
  misc_feature 1..321: note = Synthetic
  source 1..321: mol_type = other DNA
gaaatagtgatgacgcagtctccagccaccctgtctgtgtctccaggggaaagagccaccctctcctgcagggccagtcagagtgttagcagcaacttagcctggtatcagcagaaatctggccaggctcccaggctcctcatctatggtgcatccatcagggccactggtatcccagccagggtcagcggcagtgggtctgggacagagttcaccttcactatcagcagcctgcagtctgaagattttgcagtctattactgtcagcagtataagaactggcctctcactctcggcggagggaccaaggtggagatcaaa

SEQ ID NO: 200 - DNA, 348 bp, synthetic construct
  misc_feature 1..348: note = Synthetic
  source 1..348: mol_type = other DNA
gaggtgcagctggtggagtctgggggaggcttggtccagcctggggggtccctgagactctcctgtgcagcctctggattcacctttagcagcaattggatgagctgggtccgccaggctccagggaaggggctggactggatggccagcatgaagcaagatggaagtgagatatactatgtggactctgtgaagggccgattcaccatctccagagacaacgccaagaactcactgcatctgcaaatgaacagcctgagagccgaggacacggctgtgtattactgtgtgagaggagggtggagatttgagtcctggggccagggagccctggtcaccgtctcctca

SEQ ID NO: 201 - protein, 107 aa, synthetic construct
  REGION 1..107: note = Synthetic
EIVMTQSPATLSVSPGERATLSCRASQSVSSNLAWYQQKSGQAPRLLIYGASIRATGIPARVSGSGSGTEFTFTISSLQSEDFAVYYCQQYKNWPLTLGGGTKVEIK

SEQ ID NO: 202 - protein, 116 aa, synthetic construct
  REGION 1..116: note = Synthetic
EVQLVESGGGLVQPGGSLRLSCAASGFTFSSNWMSWVRQAPGKGLDWMASMKQDGSEIYYVDSVKGRFTISRDNAKNSLHLQMNSLRAEDTAVYYCVRGGWRFESWGQGALVTVSS

SEQ ID NO: 203 - DNA, 711 bp, synthetic construct
  misc_feature 1..711: note = Synthetic
  source 1..711: mol_type = other DNA
atggacatgagggtgcccgctcagctcctggggctcctgctgctgtggctgagaggtgcgcgctgtgaaatagtgatgacgcagtctccagccaccctgtctgtgtctccaggggaaagagccaccctctcctgcagggccagtcagagtgttaacagcaacttagcctggtaccagcagaaacctggccgggctcccaggctcctcatctatggtgcatccaccagggccactggtatcccagccaggttcagtggcagtgggtctgggacagagttcactctcaccatcagcagcctgcagtctgaagattttgcagtttattactgtcagcagttttataactggcctccgtggacgttcggccaggggaccaaggtggaaatcaaacgaacggtggctgcaccatctgtcttcatcttcccgccatctgatgagcagttgaaatctggaactgcctctgttgtgtgcctgctgaataacttctatcccagagaggccaaagtacagtggaaggtggataacgccctccaatcgggtaactcccaggagagtgtcacagagcaggacagcaaggacagcacctacagcctcagcagcaccctgacgctgagcaaagcagactacgagaaacacaaagtctacgcctgcgaagtcacccatcagggcctgagctcgcccgtcacaaagagcttcaacaggggagagtgt

SEQ ID NO: 204 - DNA, 1401 bp, synthetic construct
  misc_feature 1..1401: note = Synthetic
  source 1..1401: mol_type = other DNA
atggacatgagggtgcccgctcagctcctggggctcctgctgctgtggctgagaggtgcgcgctgtgaggtgcagctgttggagtctgggggaggcatggtacagccgggggggtccctgagactctcctgtgcagtctctggattcacctttagtcgctatgccatgagctgggtccgccaggctccagggaaggggctggagtgggtctcagaaatgaggggtagtagtggtagcacatactacgcagactccgtgaagggccggttcaccatctccagagacaattccaagaacacgctgtatctgcaaatgaacagcctgagagtcgaggacacggccatatattactgtgcgaaagaatttagcagcaactccctctttgactactggggccagggaaccctggtcaccgtctcctcagcctccaccaagggcccatcggtcttccccctggcgccctgctccaggagcacctccgagagcacagcggccctgggctgcctggtcaaggactacttccccgaaccggtgacggtgtcgtggaactcaggcgctctgaccagcggcgtgcacaccttcccagctgtcctacagtcctcaggactctactccctcagcagcgtggtgaccgtgccctccagcaacttcggcacccagacctacacctgcaacgtagatcacaagcccagcaacaccaaggtggacaagacagttgagcgcaaatgttgtgtcgagtgcccaccgtgcccagcaccacctgtggcaggaccgtcagtcttcctcttccccccaaaacccaaggacaccctcatgatctcccggacccctgaggtcacgtgcgtggtggtggacgtgagccacgaagaccccgaggtccagttcaactggtacgtggacggcgtggaggtgcataatgccaagacaaagccacgggaggagcagttcaacagcacgttccgtgtggtcagcgtcctcaccgttgtgcaccaggactggctgaacggcaaggagtacaagtgcaaggtctccaacaaaggcctcccagcccccatcgagaaaaccatctccaaaaccaaagggcagccccgagaaccacaggtgtacaccctgcccccatcccgggaggagatgaccaagaaccaggtcagcctgacctgcctggtcaaaggcttctaccccagcgacatcgccgtggagtgggagagcaatgggcagccggagaacaactacaagaccacacctcccatgctggactccgacggctccttcttcctctacagcaagctcaccgtggacaagagcaggtggcagcaggggaacgtcttctcatgctccgtgatgcatgaggctctgcacaaccactacacgcagaagagcctctccctgtctccgggcaaa

SEQ ID NO: 205 - protein, 237 aa, synthetic construct
  REGION 1..237: note = Synthetic
MDMRVPAQLLGLLLLWLRGARCEIVMTQSPATLSVSPGERATLSCRASQSVNSNLAWYQQKPGRAPRLLIYGASTRATGIPARFSGSGSGTEFTLTISSLQSEDFAVYYCQQFYNWPPWTFGQGTKVEIKRTVAAPSVFIFPPSDEQLKSGTASVVCLLNNFYPREAKVQWKVDNALQSGNSQESVTEQDSKDSTYSLSSTLTLSKADYEKHKVYACEVTHQGLSSPVTKSFNRGEC

SEQ ID NO: 206 - protein, 467 aa, synthetic construct
  REGION 1..467: note = Synthetic
MDMRVPAQLLGLLLLWLRGARCEVQLLESGGGMVQPGGSLRLSCAVSGFTFSRYAMSWVRQAPGKGLEWVSEMRGSSGSTYYADSVKGRFTISRDNSKNTLYLQMNSLRVEDTAIYYCAKEFSSNSLFDYWGQGTLVTVSSASTKGPSVFPLAPCSRSTSESTAALGCLVKDYFPEPVTVSWNSGALTSGVHTFPAVLQSSGLYSLSSVVTVPSSNFGTQTYTCNVDHKPSNTKVDKTVERKCCVECPPCPAPPVAGPSVFLFPPKPKDTLMISRTPEVTCVVVDVSHEDPEVQFNWYVDGVEVHNAKTKPREEQFNSTFRVVSVLTVVHQDWLNGKEYKCKVSNKGLPAPIEKTISKTKGQPREPQVYTLPPSREEMTKNQVSLTCLVKGFYPSDIAVEWESNGQPENNYKTTPPMLDSDGSFFLYSKLTVDKSRWQQGNVFSCSVMHEALHNHYTQKSLSLSPGK

SEQ ID NO: 207 - DNA, 33 bp, synthetic construct
  misc_feature 1..33: note = Synthetic
  source 1..33: mol_type = other DNA
agggccagtcagagtgttaacagcaacttagcc

SEQ ID NO: 208 - DNA, 21 bp, synthetic construct
  misc_feature 1..21: note = Synthetic
  source 1..21: mol_type = other DNA
ggtgcatccaccagggccact

SEQ ID NO: 209 - DNA, 30 bp, synthetic construct
  misc_feature 1..30: note = Synthetic
  source 1..30: mol_type = other DNA
cagcagttttataactggcctccgtggacg

SEQ ID NO: 210 - protein, 11 aa, synthetic construct
  REGION 1..11: note = Synthetic
RASQSVNSNLA

SEQ ID NO: 211 - protein, 7 aa, synthetic construct
  REGION 1..7: note = Synthetic
GASTRAT

SEQ ID NO: 212 - protein, 10 aa, synthetic construct
  REGION 1..10: note = Synthetic
QQFYNWPPWT

SEQ ID NO: 213 - DNA, 15 bp, synthetic construct
  misc_feature 1..15: note = Synthetic
  source 1..15: mol_type = other DNA
cgctatgccatgagc

SEQ ID NO: 214 - DNA, 51 bp, synthetic construct
  misc_feature 1..51: note = Synthetic
  source 1..51: mol_type = other DNA
gaaatgaggggtagtagtggtagcacatactacgcagactccgtgaagggc

SEQ ID NO: 215 - DNA, 30 bp, synthetic construct
  misc_feature 1..30: note = Synthetic
  source 1..30: mol_type = other DNA
gaatttagcagcaactccctctttgactac

SEQ ID NO: 216 - protein, 5 aa, synthetic construct
  REGION 1..5: note = Synthetic
RYAMS

SEQ ID NO: 217 - protein, 17 aa, synthetic construct
  REGION 1..17: note = Synthetic
EMRGSSGSTYYADSVKG

SEQ ID NO: 218 - protein, 10 aa, synthetic construct
  REGION 1..10: note = Synthetic
EFSSNSLFDY

SEQ ID NO: 219 - DNA, 324 bp, synthetic construct
  misc_feature 1..324: note = Synthetic
  source 1..324: mol_type = other DNA
gaaatagtgatgacgcagtctccagccaccctgtctgtgtctccaggggaaagagccaccctctcctgcagggccagtcagagtgttaacagcaacttagcctggtaccagcagaaacctggccgggctcccaggctcctcatctatggtgcatccaccagggccactggtatcccagccaggttcagtggcagtgggtctgggacagagttcactctcaccatcagcagcctgcagtctgaagattttgcagtttattactgtcagcagttttataactggcctccgtggacgttcggccaggggaccaaggtggaaatcaaa

SEQ ID NO: 220 - DNA, 357 bp, synthetic construct
  misc_feature 1..357: note = Synthetic
  source 1..357: mol_type = other DNA
gaggtgcagctgttggagtctgggggaggcatggtacagccgggggggtccctgagactctcctgtgcagtctctggattcacctttagtcgctatgccatgagctgggtccgccaggctccagggaaggggctggagtgggtctcagaaatgaggggtagtagtggtagcacatactacgcagactccgtgaagggccggttcaccatctccagagacaattccaagaacacgctgtatctgcaaatgaacagcctgagagtcgaggacacggccatatattactgtgcgaaagaatttagcagcaactccctctttgactactggggccagggaaccctggtcaccgtctcctca

SEQ ID NO: 221 - protein, 108 aa, synthetic construct
  REGION 1..108: note = Synthetic
EIVMTQSPATLSVSPGERATLSCRASQSVNSNLAWYQQKPGRAPRLLIYGASTRATGIPARFSGSGSGTEFTLTISSLQSEDFAVYYCQQFYNWPPWTFGQGTKVEIK

SEQ ID NO: 222 - protein, 119 aa, synthetic construct
  REGION 1..119: note = Synthetic
EVQLLESGGGMVQPGGSLRLSCAVSGFTFSRYAMSWVRQAPGKGLEWVSEMRGSSGSTYYADSVKGRFTISRDNSKNTLYLQMNSLRVEDTAIYYCAKEFSSNSLFDYWGQGTLVTVSS

SEQ ID NO: 223 - DNA, 711 bp, synthetic construct
  misc_feature 1..711: note = Synthetic
  source 1..711: mol_type = other DNA
atggacatgagggtgcccgctcagctcctggggctcctgctgctgtggctgagaggtgcgcgctgtgaaatagtgatgacgcagtctccagccatcctgtctgtgtctccaggggaaagagccaccctctcctgcagggccagtcagagtgttagcagcaacttagcctggtaccagcagaaacctggccaggctcccaggctcctcatctatggtgcatccaccagggccacgggtgtcccagccaggttcagtggcggtgggtctgggacagacttcactctcaccatcagcagcctgcagtctgaagattttgcagtttattactgtcagcactgtaagacctggcctccgctcactttcggcggagggaccaaggtggacctcaaacgaacggtggctgcaccatctgtcttcatcttcccgccatctgatgagcagttgaaatctggaactgcctctgttgtgtgcctgctgaataacttctatcccagagaggccaaagtacagtggaaggtggataacgccctccaatcgggtaactcccaggagagtgtcacagagcaggacagcaaggacagcacctacagcctcagcagcaccctgacgctgagcaaagcagactacgagaaacacaaagtctacgcctgcgaagtcacccatcagggcctgagctcgcccgtcacaaagagcttcaacaggggagagtgt

SEQ ID NO: 224 - DNA, 1401 bp, synthetic construct
  misc_feature 1..1401: note = Synthetic
  source 1..1401: mol_type = other DNA
atggacatgagggtgcccgctcagctcctggggctcctgctgctgtggctgagaggtgcgcgctgtgaggtgcagctgttggagtctgggggaggcttggtacagcctggggggtccctgagactctcctgtgcagcctctggattcacctttagcacctatgccatgaactgggtccgccaggctccagggaaggggctggagtgggtctcaactgttagtggtagtggtcgtcccacatactacgcagactccgtgaagggccggttcaccatctccagagacaattccaagaacacgctgtatctgcaaatgaacagcctgagagccgaggacacggccgtttattactgtgcgaaggcctactacagtaactacctttttgactactggggccagggaaccctggtcaccgtctcctcagcctccaccaagggcccatcggtcttccccctggcgccctgctccaggagcacctccgagagcacagcggccctgggctgcctggtcaaggactacttccccgaaccggtgacggtgtcgtggaactcaggcgctctgaccagcggcgtgcacaccttcccagctgtcctacagtcctcaggactctactccctcagcagcgtggtgaccgtgccctccagcaacttcggcacccagacctacacctgcaacgtagatcacaagcccagcaacaccaaggtggacaagacagttgagcgcaaatgttgtgtcgagtgcccaccgtgcccagcaccacctgtggcaggaccgtcagtcttcctcttccccccaaaacccaaggacaccctcatgatctcccggacccctgaggtcacgtgcgtggtggtggacgtgagccacgaagaccccgaggtccagttcaactggtacgtggacggcgtggaggtgcataatgccaagacaaagccacgggaggagcagttcaacagcacgttccgtgtggtcagcgtcctcaccgttgtgcaccaggactggctgaacggcaaggagtacaagtgcaaggtctccaacaaaggcctcccagcccccatcgagaaaaccatctccaaaaccaaagggcagccccgagaaccacaggtgtacaccctgcccccatcccgggaggagatgaccaagaaccaggtcagcctgacctgcctggtcaaaggcttctaccccagcgacatcgccgtggagtgggagagcaatgggcagccggagaacaactacaagaccacacctcccatgctggactccgacggctccttcttcctctacagcaagctcaccgtggacaagagcaggtggcagcaggggaacgtcttctcatgctccgtgatgcatgaggctctgcacaaccactacacgcagaagagcctctccctgtctccgggcaaa

SEQ ID NO: 225 - protein, 237 aa, synthetic construct
  REGION 1..237: note = Synthetic
MDMRVPAQLLGLLLLWLRGARCEIVMTQSPAILSVSPGERATLSCRASQSVSSNLAWYQQKPGQAPRLLIYGASTRATGVPARFSGGGSGTDFTLTISSLQSEDFAVYYCQHCKTWPPLTFGGGTKVDLKRTVAAPSVFIFPPSDEQLKSGTASVVCLLNNFYPREAKVQWKVDNALQSGNSQESVTEQDSKDSTYSLSSTLTLSKADYEKHKVYACEVTHQGLSSPVTKSFNRGEC

SEQ ID NO: 226 - protein, 467 aa, synthetic construct
  REGION 1..467: note = Synthetic
MDMRVPAQLLGLLLLWLRGARCEVQLLESGGGLVQPGGSLRLSCAASGFTFSTYAMNWVRQAPGKGLEWVSTVSGSGRPTYYADSVKGRFTISRDNSKNTLYLQMNSLRAEDTAVYYCAKAYYSNYLFDYWGQGTLVTVSSASTKGPSVFPLAPCSRSTSESTAALGCLVKDYFPEPVTVSWNSGALTSGVHTFPAVLQSSGLYSLSSVVTVPSSNFGTQTYTCNVDHKPSNTKVDKTVERKCCVECPPCPAPPVAGPSVFLFPPKPKDTLMISRTPEVTCVVVDVSHEDPEVQFNWYVDGVEVHNAKTKPREEQFNSTFRVVSVLTVVHQDWLNGKEYKCKVSNKGLPAPIEKTISKTKGQPREPQVYTLPPSREEMTKNQVSLTCLVKGFYPSDIAVEWESNGQPENNYKTTPPMLDSDGSFFLYSKLTVDKSRWQQGNVFSCSVMHEALHNHYTQKSLSLSPGK

SEQ ID NO: 227 - DNA, 33 bp, synthetic construct; identical to SEQ ID NO: 187
  misc_feature 1..33: note = Synthetic
  source 1..33: mol_type = other DNA

SEQ ID NO: 228 - DNA, 21 bp, synthetic construct
  misc_feature 1..21: note = Synthetic
  source 1..21: mol_type = other DNA
ggtgcatccaccagggccacg

SEQ ID NO: 229 - DNA, 30 bp, synthetic construct
  misc_feature 1..30: note = Synthetic
  source 1..30: mol_type = other DNA
cagcactgtaagacctggcctccgctcact

SEQ ID NO: 230 - protein, 11 aa, synthetic construct
  REGION 1..11: note = Synthetic
RASQSVSSNLA

SEQ ID NO: 231 - protein, 7 aa, synthetic construct
  REGION 1..7: note = Synthetic
GASTRAT

SEQ ID NO: 232 - protein, 10 aa, synthetic construct
  REGION 1..10: note = Synthetic
QHCKTWPPLT

SEQ ID NO: 233 - DNA, 15 bp, synthetic construct
  misc_feature 1..15: note = Synthetic
  source 1..15: mol_type = other DNA
acctatgccatgaac

SEQ ID NO: 234 - DNA, 51 bp, synthetic construct
  misc_feature 1..51: note = Synthetic
  source 1..51: mol_type = other DNA
actgttagtggtagtggtcgtcccacatactacgcagactccgtgaagggc

SEQ ID NO: 235 - DNA, 30 bp, synthetic construct
  misc_feature 1..30: note = Synthetic
  source 1..30: mol_type = other DNA
gcctactacagtaactacctttttgactac

SEQ ID NO: 236 - protein, 5 aa, synthetic construct
  REGION 1..5: note = Synthetic
TYAMN

SEQ ID NO: 237 - protein, 17 aa, synthetic construct
  REGION 1..17: note = Synthetic
TVSGSGRPTYYADSVKG

SEQ ID NO: 238 - protein, 10 aa, synthetic construct
  REGION 1..10: note = Synthetic
AYYSNYLFDY

SEQ ID NO: 239 - DNA, 324 bp, synthetic construct
  misc_feature 1..324: note = Synthetic
  source 1..324: mol_type = other DNA
gaaatagtgatgacgcagtctccagccatcctgtctgtgtctccaggggaaagagccaccctctcctgcagggccagtcagagtgttagcagcaacttagcctggtaccagcagaaacctggccaggctcccaggctcctcatctatggtgcatccaccagggccacgggtgtcccagccaggttcagtggcggtgggtctgggacagacttcactctcaccatcagcagcctgcagtctgaagattttgcagtttattactgtcagcactgtaagacctggcctccgctcactttcggcggagggaccaaggtggacctcaaa

SEQ ID NO: 240 - DNA, 357 bp, synthetic construct
  misc_feature 1..357: note = Synthetic
  source 1..357: mol_type = other DNA
gaggtgcagctgttggagtctgggggaggcttggtacagcctggggggtccctgagactctcctgtgcagcctctggattcacctttagcacctatgccatgaactgggtccgccaggctccagggaaggggctggagtgggtctcaactgttagtggtagtggtcgtcccacatactacgcagactccgtgaagggccggttcaccatctccagagacaattccaagaacacgctgtatctgcaaatgaacagcctgagagccgaggacacggccgtttattactgtgcgaaggcctactacagtaactacctttttgactactggggccagggaaccctggtcaccgtctcctca

SEQ ID NO: 241 - protein, 108 aa, synthetic construct
  REGION 1..108: note = Synthetic
EIVMTQSPAILSVSPGERATLSCRASQSVSSNLAWYQQKPGQAPRLLIYGASTRATGVPARFSGGGSGTDFTLTISSLQSEDFAVYYCQHCKTWPPLTFGGGTKVDLK

SEQ ID NO: 242 - protein, 119 aa, synthetic construct
  REGION 1..119: note = Synthetic
EVQLLESGGGLVQPGGSLRLSCAASGFTFSTYAMNWVRQAPGKGLEWVSTVSGSGRPTYYADSVKGRFTISRDNSKNTLYLQMNSLRAEDTAVYYCAKAYYSNYLFDYWGQGTLVTVSS

SEQ ID NO: 243 - DNA, 711 bp, synthetic construct
  misc_feature 1..711: note = Synthetic
  source 1..711: mol_type = other DNA
atggacatgagggtgcccgctcagctcctggggctcctgctgctgtggctgagaggtgcgcgctgtgaaatagtgatgacgcagtctccagccaccctgtctgtgtctccaggggaaagagccaccctctcctgcagggccagtcagagtattaacagcaacttagcctggtaccagcagaaacctggccaggctcccaggctcctcatctatggtgcatataccagggccactggtatcccagacaggttcagtggcagtgggtctgggacagagttcactctcaccatcagcagcctgcagtctgaagattttgcagtttattactgtcaggagtttattatgtggcctccgtggacgttcggcctagggacccaggtggaaatcaaacgaacggtggctgcaccatctgtcttcatcttcccgccatctgatgagcagttgaaatctggaactgcctctgttgtgtgcctgctgaataacttctatcccagagaggccaaagtacagtggaaggtggataacgccctccaatcgggtaactcccaggagagtgtcacagagcaggacagcaaggacagcacctacagcctcagcagcaccctgacgctgagcaaagcagactacgagaaacacaaagtctacgcctgcgaagtcacccatcagggcctgagctcgcccgtcacaaagagcttcaacaggggagagtgt

SEQ ID NO: 244 - DNA, 1401 bp, synthetic construct
  misc_feature 1..1401: note = Synthetic
  source 1..1401: mol_type = other DNA
atggacatgagggtgcccgctcagctcctggggctcctgctgctgtggctgagaggtgcgcgctgtgaggtgcaggtgttggagtctgggggaggcttggtacagcctggggagtccctgagactctcctgtacagcctctggattcacctttaacgcctatgccatgagctgggtccgccaggctccagggaaggggctggagtgggtctcaactattagtggtagtggtagtaccacatactacgcagactccgtgaagggccggttcaccatctccagagacaattccaagaacacgctggatctgcaaatgaacagcctgagagccgcggacacggccgtatattactgtgcgaaagttgctggaagtaactttttctttgaccactggggccagggaaccctggttaccgtctcctcagcctccaccaagggcccatcggtcttccccctggcgccctgctccaggagcacctccgagagcacagcggccctgggctgcctggtcaaggactacttccccgaaccggtgacggtgtcgtggaactcaggcgctctgaccagcggcgtgcacaccttcccagctgtcctacagtcctcaggactctactccctcagcagcgtggtgaccgtgccctccagcaacttcggcacccagacctacacctgcaacgtagatcacaagcccagcaacaccaaggtggacaagacagttgagcgcaaatgttgtgtcgagtgcccaccgtgcccagcaccacctgtggcaggaccgtcagtcttcctcttccccccaaaacccaaggacaccctcatgatctcccggacccctgaggtcacgtgcgtggtggtggacgtgagccacgaagaccccgaggtccagttcaactggtacgtggacggcgtggaggtgcataatgccaagacaaagccacgggaggagcagttcaacagcacgttccgtgtggtcagcgtcctcaccgttgtgcaccaggactggctgaacggcaaggagtacaagtgcaaggtctccaacaaaggcctcccagcccccatcgagaaaaccatctccaaaaccaaagggcagccccgagaaccacaggtgtacaccctgcccccatcccgggaggagatgaccaagaaccaggtcagcctgacctgcctggtcaaaggcttctaccccagcgacatcgccgtggagtgggagagcaatgggcagccggagaacaactacaagaccacacctcccatgctggactccgacggctccttcttcctctacagcaagctcaccgtggacaagagcaggtggcagcaggggaacgtcttctcatgctccgtgatgcatgaggctctgcacaaccactacacgcagaagagcctctccctgtctccgggcaaa

SEQ ID NO: 245 - protein, 237 aa, synthetic construct
  REGION 1..237: note = Synthetic
MDMRVPAQLLGLLLLWLRGARCEIVMTQSPATLSVSPGERATLSCRASQSINSNLAWYQQKPGQAPRLLIYGAYTRATGIPDRFSGSGSGTEFTLTISSLQSEDFAVYYCQEFIMWPPWTFGLGTQVEIKRTVAAPSVFIFPPSDEQLKSGTASVVCLLNNFYPREAKVQWKVDNALQSGNSQESVTEQDSKDSTYSLSSTLTLSKADYEKHKVYACEVTHQGLSSPVTKSFNRGEC

SEQ ID NO: 246 - protein, 467 aa, synthetic construct
  REGION 1..467: note = Synthetic
MDMRVPAQLLGLLLLWLRGARCEVQVLESGGGLVQPGESLRLSCTASGFTFNAYAMSWVRQAPGKGLEWVSTISGSGSTTYYADSVKGRFTISRDNSKNTLDLQMNSLRAADTAVYYCAKVAGSNFFFDHWGQGTLVTVSSASTKGPSVFPLAPCSRSTSESTAALGCLVKDYFPEPVTVSWNSGALTSGVHTFPAVLQSSGLYSLSSVVTVPSSNFGTQTYTCNVDHKPSNTKVDKTVERKCCVECPPCPAPPVAGPSVFLFPPKPKDTLMISRTPEVTCVVVDVSHEDPEVQFNWYVDGVEVHNAKTKPREEQFNSTFRVVSVLTVVHQDWLNGKEYKCKVSNKGLPAPIEKTISKTKGQPREPQVYTLPPSREEMTKNQVSLTCLVKGFYPSDIAVEWESNGQPENNYKTTPPMLDSDGSFFLYSKLTVDKSRWQQGNVFSCSVMHEALHNHYTQKSLSLSPGK

SEQ ID NO: 247 - DNA, 33 bp, synthetic construct
  misc_feature 1..33: note = Synthetic
  source 1..33: mol_type = other DNA
agggccagtcagagtattaacagcaacttagcc

SEQ ID NO: 248 - DNA, 21 bp, synthetic construct
  misc_feature 1..21: note = Synthetic
  source 1..21: mol_type = other DNA
ggtgcatataccagggccact

SEQ ID NO: 249 - DNA, 30 bp, synthetic construct
  misc_feature 1..30: note = Synthetic
  source 1..30: mol_type = other DNA
caggagtttattatgtggcctccgtggacg

SEQ ID NO: 250 - protein, 11 aa, synthetic construct
  REGION 1..11: note = Synthetic
RASQSINSNLA

SEQ ID NO: 251 - protein, 7 aa, synthetic construct
  REGION 1..7: note = Synthetic
GAYTRAT

SEQ ID NO: 252 - protein, 10 aa, synthetic construct
  REGION 1..10: note = Synthetic
QEFIMWPPWT

SEQ ID NO: 253 - DNA, 15 bp, synthetic construct
  misc_feature 1..15: note = Synthetic
  source 1..15: mol_type = other DNA
gcctatgccatgagc

SEQ ID NO: 254 - DNA, 51 bp, synthetic construct
  misc_feature 1..51: note = Synthetic
  source 1..51: mol_type = other DNA
actattagtggtagtggtagtaccacatactacgcagactccgtgaagggc

SEQ ID NO: 255 - DNA, 30 bp, synthetic construct
  misc_feature 1..30: note = Synthetic
  source 1..30: mol_type = other DNA
gttgctggaagtaactttttctttgaccac

SEQ ID NO: 256 - protein, 5 aa, synthetic construct
  REGION 1..5: note = Synthetic
AYAMS

SEQ ID NO: 257 - protein, 17 aa, synthetic construct
  REGION 1..17: note = Synthetic
TISGSGSTTYYADSVKG

SEQ ID NO: 258 - protein, 10 aa, synthetic construct
  REGION 1..10: note = Synthetic
VAGSNFFFDH

SEQ ID NO: 259 - DNA, 324 bp, synthetic construct
  misc_feature 1..324: note = Synthetic
  source 1..324: mol_type = other DNA
gaaatagtgatgacgcagtctccagccaccctgtctgtgtctccaggggaaagagccaccctctcctgcagggccagtcagagtattaacagcaacttagcctggtaccagcagaaacctggccaggctcccaggctcctcatctatggtgcatataccagggccactggtatcccagacaggttcagtggcagtgggtctgggacagagttcactctcaccatcagcagcctgcagtctgaagattttgcagtttattactgtcaggagtttattatgtggcctccgtggacgttcggcctagggacccaggtggaaatcaaa

SEQ ID NO: 260 - DNA, 357 bp, synthetic construct
  misc_feature 1..357: note = Synthetic
  source 1..357: mol_type = other DNA
gaggtgcaggtgttggagtctgggggaggcttggtacagcctggggagtccctgagactctcctgtacagcctctggattcacctttaacgcctatgccatgagctgggtccgccaggctccagggaaggggctggagtgggtctcaactattagtggtagtggtagtaccacatactacgcagactccgtgaagggccggttcaccatctccagagacaattccaagaacacgctggatctgcaaatgaacagcctgagagccgcggacacggccgtatattactgtgcgaaagttgctggaagtaactttttctttgaccactggggccagggaaccctggttaccgtctcctca

SEQ ID NO: 261 - protein, 108 aa, synthetic construct
  REGION 1..108: note = Synthetic
EIVMTQSPATLSVSPGERATLSCRASQSINSNLAWYQQKPGQAPRLLIYGAYTRATGIPDRFSGSGSGTEFTLTISSLQSEDFAVYYCQEFIMWPPWTFGLGTQVEIK

SEQ ID NO: 262 - protein, 119 aa, synthetic construct
  REGION 1..119: note = Synthetic
EVQVLESGGGLVQPGESLRLSCTASGFTFNAYAMSWVRQAPGKGLEWVSTISGSGSTTYYADSVKGRFTISRDNSKNTLDLQMNSLRAADTAVYYCAKVAGSNFFFDHWGQGTLVTVSS

SEQ ID NO: 263 - DNA, 708 bp, synthetic construct
  misc_feature 1..708: note = Synthetic
  source 1..708: mol_type = other DNA
atggacatgagggtgcccgctcagctcctggggctcctgctgctgtggctgagaggtgcgcgctgtgacatccagatgacccagtctccatcctccctgtctgcatctgtaggagacagagtcaacatcacttgccaggcgagtcaggacattaggaaacatttaaattggtatcagcagaaaccagggaaagcccctaacctcctgatctacgatgcagccaatttggaaacaggggtcccatcaaggttcagtggaagtggttctgggacagcttttactttcaccatcagcagcctgcagcctgaagatattgcaacatattactgtcaacactatgctaatctcccgatcaccttcggccaagggacacgactggagattaaacgaacggtggctgcaccatctgtcttcatcttcccgccatctgatgagcagttgaaatctggaactgcctctgttgtgtgcctgctgaataacttctatcccagagaggccaaagtacagtggaaggtggataacgccctccaatcgggtaactcccaggagagtgtcacagagcaggacagcaaggacagcacctacagcctcagcagcaccctgacgctgagcaaagcagactacgagaaacacaaagtctacgcctgcgaagtcacccatcagggcctgagctcgcccgtcacaaagagcttcaacaggggagagtgt

SEQ ID NO: 264 - DNA, 1410 bp, synthetic construct
  misc_feature 1..1410: note = Synthetic
  source 1..1410: mol_type = other DNA
atggacatgagggtgcccgctcagctcctggggctcctgctgctgtggctgagaggtgcgcgctgtcaggtgcagctggtgcagtctggggctgaggtgaagaagcctggggcctcagtgaaggtctcctgcaaggcttctggatacaccttcaccagatatgatatcaactgggtgcgacaggccactggacaaggacttgagtggatgggatggatgaaccctaacagtggtaactcaggctctgtacagaagttccggggcagagtcaccatgaccaggaacacctccatacacatagcctacatggaactgagcagcctgagatctgaggacacggccgtgtattactgtgcgagaggcgggtataccagcagctggcggtggtacttcgatctctggggccgtggcaccctggtcactgtctcctcagcctccaccaagggcccatcggtcttccccctggcgccctgctccaggagcacctccgagagcacagcggccctgggctgcctggtcaaggactacttccccgaaccggtgacggtgtcgtggaactcaggcgctctgaccagcggcgtgcacaccttcccagctgtcctacagtcctcaggactctactccctcagcagcgtggtgaccgtgccctccagcaacttcggcacccagacctacacctgcaacgtagatcacaagcccagcaacaccaaggtggacaagacagttgagcgcaaatgttgtgtcgagtgcccaccgtgcccagcaccacctgtggcaggaccgtcagtcttcctcttccccccaaaacccaaggacaccctcatgatctcccggacccctgaggtcacgtgcgtggtggtggacgtgagccacgaagaccccgaggtccagttcaactggtacgtggacggcgtggaggtgcataatgccaagacaaagccacgggaggagcagttcaacagcacgttccgtgtggtcagcgtcctcaccgttgtgcaccaggactggctgaacggcaaggagtacaagtgcaaggtctccaacaaaggcctcccagcccccatcgagaaaaccatctccaaaaccaaagggcagccccgagaaccacaggtgtacaccctgcccccatcccgggaggagatgaccaagaaccaggtcagcctgacctgcctggtcaaaggcttctaccccagcgacatcgccgtggagtgggagagcaatgggcagccggagaacaactacaagaccacacctcccatgctggactccgacggctccttcttcctctacagcaagctcaccgtggacaagagcaggtggcagcaggggaacgtcttctcatgctccgtgatgcatgaggctctgcacaaccactacacgcagaagagcctctccctgtctccgggcaaa

SEQ ID NO: 265 - protein, 236 aa, synthetic construct
  REGION 1..236: note = Synthetic
MDMRVPAQLLGLLLLWLRGARCDIQMTQSPSSLSASVGDRVNITCQASQDIRKHLNWYQQKPGKAPNLLIYDAANLETGVPSRFSGSGSGTAFTFTISSLQPEDIATYYCQHYANLPITFGQGTRLEIKRTVAAPSVFIFPPSDEQLKSGTASVVCLLNNFYPREAKVQWKVDNALQSGNSQESVTEQDSKDSTYSLSSTLTLSKADYEKHKVYACEVTHQGLSSPVTKSFNRGEC

SEQ ID NO: 266 - protein, 470 aa, synthetic construct
  REGION 1..470: note = Synthetic
MDMRVPAQLLGLLLLWLRGARCQVQLVQSGAEVKKPGASVKVSCKASGYTFTRYDINWVRQATGQGLEWMGWMNPNSGNSGSVQKFRGRVTMTRNTSIHIAYMELSSLRSEDTAVYYCARGGYTSSWRWYFDLWGRGTLVTVSSASTKGPSVFPLAPCSRSTSESTAALGCLVKDYFPEPVTVSWNSGALTSGVHTFPAVLQSSGLYSLSSVVTVPSSNFGTQTYTCNVDHKPSNTKVDKTVERKCCVECPPCPAPPVAGPSVFLFPPKPKDTLMISRTPEVTCVVVDVSHEDPEVQFNWYVDGVEVHNAKTKPREEQFNSTFRVVSVLTVVHQDWLNGKEYKCKVSNKGLPAPIEKTISKTKGQPREPQVYTLPPSREEMTKNQVSLTCLVKGFYPSDIAVEWESNGQPENNYKTTPPMLDSDGSFFLYSKLTVDKSRWQQGNVFSCSVMHEALHNHYTQKSLSLSPGK

SEQ ID NO: 267 - DNA, 33 bp, synthetic construct
  misc_feature 1..33: note = Synthetic
  source 1..33: mol_type = other DNA
caggcgagtcaggacattaggaaacatttaaat

SEQ ID NO: 268 - DNA, 21 bp, synthetic construct
  misc_feature 1..21: note = Synthetic
  source 1..21: mol_type = other DNA
gatgcagccaatttggaaaca

SEQ ID NO: 269 - DNA, 27 bp, synthetic construct
  misc_feature 1..27: note = Synthetic
  source 1..27: mol_type = other DNA
caacactatgctaatctcccgatcacc

SEQ ID NO: 270 - protein, 11 aa, synthetic construct
  REGION 1..11: note = Synthetic
QASQDIRKHLN

SEQ ID NO: 271 - protein, 7 aa, synthetic construct
  REGION 1..7: note = Synthetic
DAANLET

SEQ ID NO: 272 - protein, 9 aa, synthetic construct
  REGION 1..9: note = Synthetic
QHYANLPIT

SEQ ID NO: 273 - DNA, 15 bp, synthetic construct
  misc_feature 1..15: note = Synthetic
  source 1..15: mol_type = other DNA
agatatgatatcaac

SEQ ID NO: 274 - DNA, 51 bp, synthetic construct
  misc_feature 1..51: note = Synthetic
  source 1..51: mol_type = other DNA
tggatgaaccctaacagtggtaactcaggctctgtacagaagttccggggc

SEQ ID NO: 275 - DNA, 39 bp, synthetic construct
  misc_feature 1..39: note = Synthetic
  source 1..39: mol_type = other DNA
ggcgggtataccagcagctggcggtggtacttcgatctc

SEQ ID NO: 276 - protein, 5 aa, synthetic construct
  REGION 1..5: note = Synthetic
RYDIN

SEQ ID NO: 277 - protein, 17 aa, synthetic construct
  REGION 1..17: note = Synthetic
WMNPNSGNSGSVQKFRG

SEQ ID NO: 278 - protein, 13 aa, synthetic construct
  REGION 1..13: note = Synthetic
GGYTSSWRWYFDL

SEQ ID NO: 279 - DNA, 321 bp, synthetic construct
  misc_feature 1..321: note = Synthetic
  source 1..321: mol_type = other DNA
gacatccagatgacccagtctccatcctccctgtctgcatctgtaggagacagagtcaacatcacttgccaggcgagtcaggacattaggaaacatttaaattggtatcagcagaaaccagggaaagcccctaacctcctgatctacgatgcagccaatttggaaacaggggtcccatcaaggttcagtggaagtggttctgggacagcttttactttcaccatcagcagcctgcagcctgaagatattgcaacatattactgtcaacactatgctaatctcccgatcaccttcggccaagggacacgactggagattaaa

SEQ ID NO: 280 - DNA, 366 bp, synthetic construct
  misc_feature 1..366: note = Synthetic
  source 1..366: mol_type = other DNA
caggtgcagctggtgcagtctggggctgaggtgaagaagcctggggcctcagtgaaggtctcctgcaaggcttctggatacaccttcaccagatatgatatcaactgggtgcgacaggccactggacaaggacttgagtggatgggatggatgaaccctaacagtggtaactcaggctctgtacagaagttccggggcagagtcaccatgaccaggaacacctccatacacatagcctacatggaactgagcagcctgagatctgaggacacggccgtgtattactgtgcgagaggcgggtataccagcagctggcggtggtacttcgatctctggggccgtggcaccctggtcactgtctcctca

SEQ ID NO: 281 - protein, 107 aa, synthetic construct
  REGION 1..107: note = Synthetic
DIQMTQSPSSLSASVGDRVNITCQASQDIRKHLNWYQQKPGKAPNLLIYDAANLETGVPSRFSGSGSGTAFTFTISSLQPEDIATYYCQHYANLPITFGQGTRLEIK

SEQ ID NO: 282 - protein, 122 aa, synthetic construct
  REGION 1..122: note = Synthetic
QVQLVQSGAEVKKPGASVKVSCKASGYTFTRYDINWVRQATGQGLEWMGWMNPNSGNSGSVQKFRGRVTMTRNTSIHIAYMELSSLRSEDTAVYYCARGGYTSSWRWYFDLWGRGTLVTVSS

SEQ ID NO: 283 - DNA, 699 bp, synthetic construct
  misc_feature 1..699: note = Synthetic
  source 1..699: mol_type = other DNA
atggacatgagggtgcccgctcagctcctggggctcctgctgctgtggctgagaggtgcgcgctgttcctatgagctgactcagccaccctcagtgtccgtgtccccaggacagacagccagcatcacctgctctggagataaattgggggagagaaatgtttgctggtatcagttgaagccaggccagtcccctattctggtcatctatcaagataacaagcggccctcagggatccctgagcgattctctggctccaagtctgggaacacagccattctgaccatcagcgggacccaggcaatggatgaggctgactattactgtcaggcgtgggacagaaatgtggtattcggcggagggaccaagctgaccgtcctaggtcagcccaaggctgcaccctcggtcactctgttcccgccctcctctgaggagcttcaagccaacaaggccacactggtgtgtctcatcagtgacttctacccgggagccgtgacagtggcctggaaggcagatagcagccccgtcaaggcgggagtggaaaccaccacaccctccaaacaaagcaacaacaagtacgcggccagcagctatctgagcctgacgcctgagcagtggaagtcccacagaagctacagctgccaggtcacgcatgaagggagcaccgtggagaagacagtggcccctacagaatgttca

SEQ ID NO: 284 - DNA, 1407 bp, synthetic construct
  misc_feature 1..1407: note = Synthetic
  source 1..1407: mol_type = other DNA
atggacatgagggtgcccgctcagctcctggggctcctgctgctgtggctgagaggtgcgcgctgtcaggtgcagctggtgcagtctggggctgaggtgaagaagcctggggcctcagtgaaggtctcctgcaaggcttctggatacaccttcaacggctactatatacactgggtgcgacaggcccctggacaagggcttgagtggatgggatggctcaacccaaacagtggtggcgcaaactatgcacagaagtttcagggctgggtcaccatgaccagggacacgtccatcagcacagcctacatggagctgagcaggctgacatctgacgacacggccgtgtattactgtgcgagagatcagaggaagaccacggtgactccctttgagtactggggccagggaaccctggtcaccgtctcctcagcctccaccaagggcccatcggtcttccccctggcgccctgctccaggagcacctccgagagcacagcggccctgggctgcctggtcaaggactacttccccgaaccggtgacggtgtcgtggaactcaggcgctctgaccagcggcgtgcacaccttcccagctgtcctacagtcctcaggactctactccctcagcagcgtggtgaccgtgccctccagcaacttcggcacccagacctacacctgcaacgtagatcacaagcccagcaacaccaaggtggacaagacagttgagcgcaaatgttgtgtcgagtgcccaccgtgcccagcaccacctgtggcaggaccgtcagtcttcctcttccccccaaaacccaaggacaccctcatgatctcccggacccctgaggtcacgtgcgtggtggtggacgtgagccacgaagaccccgaggtccagttcaactggtacgtggacggcgtggaggtgcataatgccaagacaaagccacgggaggagcagttcaacagcacgttccgtgtggtcagcgtcctcaccgttgtgcaccaggactggctgaacggcaaggagtacaagtgcaaggtctccaacaaaggcctcccagcccccatcgagaaaaccatctccaaaaccaaagggcagccccgagaaccacaggtgtacaccctgcccccatcccgggaggagatgaccaagaaccaggtcagcctgacctgcctggtcaaaggcttctaccccagcgacatcgccgtggagtgggagagcaatgggcagccggagaacaactacaagaccacacctcccatgctggactccgacggctccttcttcctctacagcaagctcaccgtggacaagagcaggtggcagcaggggaacgtcttctcatgctccgtgatgcatgaggctctgcacaaccactacacgcagaagagcctctccctgtctccgggcaaa

SEQ ID NO: 285 - protein, 233 aa, synthetic construct
  REGION 1..233: note = Synthetic
MDMRVPAQLLGLLLLWLRGARCSYELTQPPSVSVSPGQTASITCSGDKLGERNVCWYQLKPGQSPILVIYQDNKRPSGIPERFSGSKSGNTAILTISGTQAMDEADYYCQAWDRNVVFGGGTKLTVLGQPKAAPSVTLFPPSSEELQANKATLVCLISDFYPGAVTVAWKADSSPVKAGVETTTPSKQSNNKYAASSYLSLTPEQWKSHRSYSCQVTHEGSTVEKTVAPTECS

SEQ ID NO: 286 - protein, 469 aa, synthetic construct
  REGION 1..469: note = Synthetic
MDMRVPAQLLGLLLLWLRGARCQVQLVQSGAEVKKPGASVKVSCKASGYTFNGYYIHWVRQAPGQGLEWMGWLNPNSGGANYAQKFQGWVTMTRDTSISTAYMELSRLTSDDTAVYYCARDQRKTTVTPFEYWGQGTLVTVSSASTKGPSVFPLAPCSRSTSESTAALGCLVKDYFPEPVTVSWNSGALTSGVHTFPAVLQSSGLYSLSSVVTVPSSNFGTQTYTCNVDHKPSNTKVDKTVERKCCVECPPCPAPPVAGPSVFLFPPKPKDTLMISRTPEVTCVVVDVSHEDPEVQFNWYVDGVEVHNAKTKPREEQFNSTFRVVSVLTVVHQDWLNGKEYKCKVSNKGLPAPIEKTISKTKGQPREPQVYTLPPSREEMTKNQVSLTCLVKGFYPSDIAVEWESNGQPENNYKTTPPMLDSDGSFFLYSKLTVDKSRWQQGNVFSCSVMHEALHNHYTQKSLSLSPGK

SEQ ID NO: 287 - DNA, 33 bp, synthetic construct
  misc_feature 1..33: note = Synthetic
  source 1..33: mol_type = other DNA
tctggagataaattgggggagagaaatgtttgc

SEQ ID NO: 288 - DNA, 21 bp, synthetic construct
  misc_feature 1..21: note = Synthetic
  source 1..21: mol_type = other DNA
caagataacaagcggccctca

SEQ ID NO: 289 - DNA, 24 bp, synthetic construct
  misc_feature 1..24: note = Synthetic
  source 1..24: mol_type = other DNA
caggcgtgggacagaaatgtggta

SEQ ID NO: 290 - protein, 11 aa, synthetic construct
  REGION 1..11: note = Synthetic
SGDKLGERNVC

SEQ ID NO: 291 - protein, 7 aa, synthetic construct
  REGION 1..7: note = Synthetic
QDNKRPS

SEQ ID NO: 292 - protein, 8 aa, synthetic construct
  REGION 1..8: note = Synthetic
QAWDRNVV

SEQ ID NO: 293 - DNA, 15 bp, synthetic construct
  misc_feature 1..15: note = Synthetic
  source 1..15: mol_type = other DNA
ggctactatatacac

SEQ ID NO: 294 - DNA, 51 bp, synthetic construct
  misc_feature 1..51: note = Synthetic
  source 1..51: mol_type = other DNA
tggctcaacccaaacagtggtggcgcaaactatgcacagaagtttcagggc

SEQ ID NO: 295 - DNA, 36 bp, synthetic construct
  misc_feature 1..36: note = Synthetic
  source 1..36: mol_type = other DNA
gatcagaggaagaccacggtgactccctttgagtac

SEQ ID NO: 296 - protein, 5 aa, synthetic construct
  REGION 1..5: note = Synthetic
GYYIH

SEQ ID NO: 297 - protein, 17 aa, synthetic construct
  REGION 1..17: note = Synthetic
WLNPNSGGANYAQKFQG

SEQ ID NO: 298 - protein, 12 aa, synthetic construct
  REGION 1..12: note = Synthetic
DQRKTTVTPFEY

SEQ ID NO: 299 - DNA, 315 bp, synthetic construct
  misc_feature 1..315: note = Synthetic
  source 1..315: mol_type = other DNA
tcctatgagctgactcagccaccctcagtgtccgtgtccccaggacagacagccagcatcacctgctctggagataaattgggggagagaaatgtttgctggtatcagttgaagccaggccagtcccctattctggtcatctatcaagataacaagcggccctcagggatccctgagcgattctctggctccaagtctgggaacacagccattctgaccatcagcgggacccaggcaatggatgaggctgactattactgtcaggcgtgggacagaaatgtggtattcggcggagggaccaagctgaccgtccta

SEQ ID NO: 300 - DNA, 363 bp, synthetic construct
  misc_feature 1..363: note = Synthetic
  source 1..363: mol_type = other DNA
caggtgcagctggtgcagtctggggctgaggtgaagaagcctggggcctcagtgaaggtctcctgcaaggcttctggatacaccttcaacggctactatatacactgggtgcgacaggcccctggacaagggcttgagtggatgggatggctcaacccaaacagtggtggcgcaaactatgcacagaagtttcagggctgggtcaccatgaccagggacacgtccatcagcacagcctacatggagctgagcaggctgacatctgacgacacggccgtgtattactgtgcgagagatcagaggaagaccacggtgactccctttgagtactggggccagggaaccctggtcaccgtctcctca

SEQ ID NO: 301 - protein, 105 aa, synthetic construct
  REGION 1..105: note = Synthetic
SYELTQPPSVSVSPGQTASITCSGDKLGERNVCWYQLKPGQSPILVIYQDNKRPSGIPERFSGSKSGNTAILTISGTQAMDEADYYCQAWDRNVVFGGGTKLTVL

SEQ ID NO: 302 - protein, 121 aa, synthetic construct
  REGION 1..121: note = Synthetic
QVQLVQSGAEVKKPGASVKVSCKASGYTFNGYYIHWVRQAPGQGLEWMGWLNPNSGGANYAQKFQGWVTMTRDTSISTAYMELSRLTSDDTAVYYCARDQRKTTVTPFEYWGQGTLVTVSS

SEQ ID NO: 303 - DNA, 1926 bp, synthetic construct
  misc_feature 1..1926: note = Synthetic
  source 1..1926: mol_type = other DNA
atggacatgagggtgcccgctcagctcctggggctcctgctgctgtggctgagaggtgcgcgctgtgaggtgcaggtgttggagtctgggggaggcttggtacagcctggggagtccctgagactctcctgtacagcctctggattcacctttaacgcctatgccatgagctgggtccgccaggctccagggaaggggctggagtgggtgtcaactattagtggtagtggtagtaccacatactacgcagactccgtgaagggccggttcaccatctccagagacaattccaagaacacgctggatctgcaaatgaacagcctgagagccgcggacacggccgtatattactgtgcgaaagttgctggaagtaactttttctttgaccactggggccagggaaccctggttaccgtgtcctcagcctccaccaagggcccatcggtcttccccctggcaccctcctccaagagcacctctgggggcacagcggccctgggctgcctggtcaaggactacttccccgaaccggtgacggtgtcgtggaactcaggcgccctgaccagcggcgtgcacaccttcccggctgtcctacagtcctcaggactctactccctcagcagcgtggtgaccgtgccctccagcagcttgggcacccagacctacatctgcaacgtgaatcacaagcccagcaacaccaaggtggacaagaaagttgagcccaaatcttgtgacaaaactcacacatgcccaccgtgcccagcacctgaactcctggggggaccgtcagtcttcctcttccccccaaaacccaaggacaccctcatgatctcccggacccctgaggtcacatgcgtggtggtggacgtgagccacgaagaccctgaggtcaagttcaactggtacgtggacggcgtggaggtgcataatgccaagacaaagccgtgcgaggagcagtacggcagcacgtaccgttgcgtcagcgtcctcaccgtcctgcaccaggactggctgaatggcaaggagtacaagtgcaaggtgtccaacaaagccctcccagcccccatcgagaaaaccatctccaaagccaaagggcagccccgagaaccacaggtgtacaccctgcccccatcccgggaggagatgaccaagaaccaggtcagcctgacctgcctggtcaaaggcttctatcccagcgacatcgccgtggagtgggagagcaatgggcagccggagaacaactacaagaccacgcctcccgtgctggactccgacggctccttcttcctctatagcaagctcaccgtggacaagagcaggtggcagcaggggaacgtcttctcatgctccgtgatgcatgaggctctgcacaaccactacacgcagaagagcctctccctgtctcccgggggaggcggtggatcctctccaggtcaaggtactcaatccgaaaactcctgcacccacttcccgggtaacctgccgaacatgctgcgtgacctgcttgacgctttctcccgtgttaaaaccttcttccagatgaaagaccagctggacaacctgctgctgaaagaatccctgctggaagacttcaaaggttacctgggttgtcaggctctgtccgaaatgatccagttctacctggaagaagttatgccgcaggctgaaaaccaggacccggacatcaaagctcacgttaactccctgggtgaaaacctgaaaaccctgcgtctgcgtctgcgccgttgccatcgattcctgccgtgcgaaaacggtggcggttctggtggtaaatccaaagctgttgaacaggttaaaaacgctttcaacaaactgcaggaaaaaggtatctacaaagctatgtccgaattcgacatcttcatcaactacatcgaagcttacatgaccatgaaaatccgtaactag

SEQ ID NO: 304 - DNA, 714 bp, synthetic construct
  misc_feature 1..714: note = Synthetic
  source 1..714: mol_type = other DNA
atggacatgagggtgcccgctcagctcctggggctcctgctgctgtggctgagaggtgcgcgctgtgaaatcgtgatgacgcagtctccagccaccctgtctgtgtctccaggggaaagagccaccctctcctgcagggccagtcagagtattaacagcaacttagcctggtaccagcagaaacctggccaggctcccaggctcctcatctatggtgcatataccagggccactggtatcccagacaggttcagtggcagtgggtctgggacagagttcactctcaccatcagcagcctgcagtctgaagattttgcagtttattactgtcaggagtttattatgtggcctccgtggacgttcggccaggggaccaaggtggaaatcaaacgaacggtggctgcaccatctgtcttcatcttcccgccatctgatgagcagttgaaatctggaactgcctctgttgtgtgcctgctgaataacttctatcccagagaggccaaagtacagtggaaggtggataacgccctccaatcgggtaactcccaggagagtgtcacagagcaggacagcaaggacagcacctacagcctcagcagcaccctgacgctgagcaaagcagactacgagaaacacaaagtctacgcctgcgaagtcacccatcagggcctgagctcgcccgtcacaaagagcttcaacaggggagagtgttag

SEQ ID NO: 305 - DNA, 1926 bp, synthetic construct
  misc_feature 1..1926: note = Synthetic
  source 1..1926: mol_type = other DNA
atggacatgagggtgcccgctcagctcctggggctcctgctgctgtggctgagaggtgcgcgctgtgaggtgcaggtgttggagtctgggggaggcttggtacagcctggggagtccctgagactctcctgtacagcctctggattcacctttaacgcctatgccatgagctgggtccgccaggctccagggaaggggctggagtgggtgtcaactattagtggtagtggtagtaccacatactacgcagactccgtgaagggccggttcaccatctccagagacaattccaagaacacgctggatctgcaaatgaacagcctgagagccgcggacacggccgtatattactgtgcgaaagttgctggaagtaactttttctttgaccactggggccagggaaccctggttaccgtgtcctcagcctccaccaagggcccatcggtcttccccctggcaccctcctccaagagcacctctgggggcacagcggccctgggctgcctggtcaaggactacttccccgaaccggtgacggtgtcgtggaactcaggcgccctgaccagcggcgtgcacaccttcccggctgtcctacagtcctcaggactctactccctcagcagcgtggtgaccgtgccctccagcagcttgggcacccagacctacatctgcaacgtgaatcacaagcccagcaacaccaaggtggacaagaaagttgagcccaaatcttgtgacaaaactcacacatgcccaccgtgcccagcacctgaactcctggggggaccgtcagtcttcctcttccccccaaaacccaaggacaccctcatgatctcccggacccctgaggtcacatgcgtggtggtggacgtgagccacgaagaccctgaggtcaagttcaactggtacgtggacggcgtggaggtgcataatgccaagacaaagccgtgcgaggagcagtacggcagcacgtaccgttgcgtcagcgtcctcaccgtcctgcaccaggactggctgaatggcaaggagtacaagtgcaaggtgtccaacaaagccctcccagcccccatcgagaaaaccatctccaaagccaaagggcagccccgagaaccacaggtgtacaccctgcccccatcccgggaggagatgaccaagaaccaggtcagcctgacctgcctggtcaaaggcttctatcccagcgacatcgccgtggagtgggagagcaatgggcagccggagaacaactacaagaccacgcctcccgtgctggactccgacggctccttcttcctctatagcaagctcaccgtggacaagagcaggtggcagcaggggaacgtcttctcatgctccgtgatgcatgaggctctgcacaaccactacacgcagaagagcctctccctgtctcccgggggaggcggtggatcctctccaggtcaaggtactcaatccgaaaactcctgcacccacttcccgggtaacctgccgaacatgctgcgtgacctgcgtgacgctttctcccgtgttaaaaccttcttccagatgaaagaccagctggacaacctgctgctgaaagaatccctgctggaagacttcaaaggttacctgggttgtcaggctctgtccgaaatgatccagttctacctggaagaagttatgccgcaggctgaaaaccaggacccggacatcaaagctcacgttaactccctgggtgaaaacctgaaaaccctgcgtctgcgtctgcgccgttgccatcgattcctgccgtgcgaaaacggtggcggttctggtggtaaatccaaagctgttgaacaggttaaaaacgctttcaacaaactgcaggaaaaaggtatctacttagctatgtccgaattcgacatcttcatcaactacatcgaagcttacatgaccatgaaaatccgtaactag

SEQ ID NO: 306 - DNA, 714 bp, synthetic construct; identical to SEQ ID NO: 304
  misc_feature 1..714: note = Synthetic
  source 1..714: mol_type = other DNA

SEQ ID NO: 307 - DNA, 1926 bp, synthetic construct
  misc_feature 1..1926: note = Synthetic
  source 1..1926: mol_type = other DNA
atggacatgagggtgcccgctcagctcctggggctcctgctgctgtggctgagaggtgcgcgctgtgaggtgcaggtgttggagtctgggggaggcttggtacagcctggggagtccctgagactctcctgtacagcctctggattcacctttaacgcctatgccatgagctgggtccgccaggctccagggaaggggctggagtgggtgtcaactattagtggtagtggtagtaccacatactacgcagactccgtgaagggccggttcaccatctccagagacaattccaagaacacgctggatctgcaaatgaacagcctgagagccgcggacacggccgtatattactgtgcgaaagttgctggaagtaactttttctttgaccactggggccagggaaccctggttaccgtgtcctcagcctccaccaagggcccatcggtcttccccctggcaccctcctccaagagcacctctgggggcacagcggccctgggctgcctggtcaaggactacttccccgaaccggtgacggtgtcgtggaactcaggcgccctgaccagcggcgtgcacaccttcccggctgtcctacagtcctcaggactctactccctcagcagcgtggtgaccgtgccctccagcagcttgggcacccagacctacatctgcaacgtgaatcacaagcccagcaacaccaaggtggacaagaaagttgagcccaaatcttgtgacaaaactcacacatgcccaccgtgcccagcacctgaactcctggggggaccgtcagtcttcctcttccccccaaaacccaaggacaccctcatgatctcccggacccctgaggtcacatgcgtggtggtggacgtgagccacgaagaccctgaggtcaagttcaactggtacgtggacggcgtggaggtgcataatgccaagacaaagccgtgcgaggagcagtacggcagcacgtaccgttgcgtcagcgtcctcaccgtcctgcaccaggactggctgaatggcaaggagtacaagtgcaaggtgtccaacaaagccctcccagcccccatcgagaaaaccatctccaaagccaaagggcagccccgagaaccacaggtgtacaccctgcccccatcccgggaggagatgaccaagaaccaggtcagcctgacctgcctggtcaaaggcttctatcccagcgacatcgccgtggagtgggagagcaatgggcagccggagaacaactacaagaccacgcctcccgtgctggactccgacggctccttcttcctctatagcaagctcaccgtggacaagagcaggtggcagcaggggaacgtcttctcatgctccgtgatgcatgaggctctgcacaaccactacacgcagaagagcctctccctgtctcccgggggaggcggtggatcctctccaggtcaaggtactcaatccgaaaactcctgcacccacttcccgggtaacctgccgaacatgctgcgtgacctgcgtgacgctttctcccgtgttaaaaccttcttccagatgaaagaccagctggacaacctgctgctgaaagaatccctgctggaagacttcaaaggttacctgggttgtcaggctctgtccgaaatgatccagttctacctggaagaagttatgccgcaggctgaaaaccaggacccggacatcaaagctcacgttaactccctgggtgaaaacctgaaaaccctgcgtctgcgtctgcgccgttgccatcgattcctgccgtgcgaaaacggtggcggttctggtggtaaatccaaagctgttgaacaggttaaaaacgctttcaacaaactgcaggaaaaaggtatctacgacgctatgtccgaattcgacatcttcatcaactacatcgaagcttacatgaccatgaaaatccgtaactag

SEQ ID NO: 308 - DNA, 714 bp, synthetic construct; identical to SEQ ID NO: 304
  misc_feature 1..714: note = Synthetic
  source 1..714: mol_type = other DNA

SEQ ID NO: 309 - DNA, 1926 bp, synthetic construct
  misc_feature 1..1926: note = Synthetic
  source 1..1926: mol_type = other DNA
atggacatgagggtgcccgctcagctcctggggctcctgctgctgtggctgagaggtgcgcgctgtgaggtgcaggtgttggagtctgggggaggcttggtacagcctggggagtccctgagactctcctgtacagcctctggattcacctttaacgcctatgccatgagctgggtccgccaggctccagggaaggggctggagtgggtgtcaactattagtggtagtggtagtaccacatactacgcagactccgtgaagggccggttcaccatctccagagacaattccaagaacacgctggatctgcaaatgaacagcctgagagccgcggacacggccgtatattactgtgcgaaagttgctggaagtaactttttctttgaccactggggccagggaaccctggttaccgtgtcctcagcctccaccaagggcccatcggtcttccccctggcaccctcctccaagagcacctctgggggcacagcggccctgggctgcctggtcaaggactacttccccgaaccggtgacggtgtcgtggaactcaggcgccctgaccagcggcgtgcacaccttcccggctgtcctacagtcctcaggactctactccctcagcagcgtggtgaccgtgccctccagcagcttgggcacccagacctacatctgcaacgtgaatcacaagcccagcaacaccaaggtggacaagaaagttgagcccaaatcttgtgacaaaactcacacatgcccaccgtgcccagcacctgaactcctggggggaccgtcagtcttcctcttccccccaaaacccaaggacaccctcatgatctcccggacccctgaggtcacatgcgtggtggtggacgtgagccacgaagaccctgaggtcaagttcaactggtacgtggacggcgtggaggtgcataatgccaagacaaagccgtgcgaggagcagtacggcagcacgtaccgttgcgtcagcgtcctcaccgtcctgcaccaggactggctgaatggcaaggagtacaagtgcaaggtgtccaacaaagccctcccagcccccatcgagaaaaccatctccaaagccaaagggcagccccgagaaccacaggtgtacaccctgcccccatcccgggaggagatgaccaagaaccaggtcagcctgacctgcctggtcaaaggcttctatcccagcgacatcgccgtggagtgggagagcaatgggcagccggagaacaactacaagaccacgcctcccgtgctggactccgacggctccttcttcctctatagcaagctcaccgtggacaagagcaggtggcagcaggggaacgtcttctcatgctccgtgatgcatgaggctctgcacaaccactacacgcagaagagcctctccctgtctcccgggggaggcggtggatcctctccaggtcaaggtactcaatccgaaaactcctgcacccacttcccgggtaacctgccgaacatgctgcgtgacctgcgtgacgctttctcccgtgttaaaaccttcttccagatgaaaggccagctggacaacctgctgctgaaagaatccctgctggaagacttcaaaggttacctgggttgtcaggctctgtccgaaatgatccagttctacctggaagaagttatgccgcaggctgaaaaccaggacccggacatcaaagctcacgttaactccctgggtgaaaacctgaaaaccctgcgtctgcgtctgcgccgttgccatcgattcctgccgtgcgaaaacggtggcggttctggtggtaaatccaaagctgttgaacaggttaaaaacgctttcaacaaactgcaggaaaaaggtatctacaaagctatgtccgaattcgacatcttcatcaactacatcgaagcttacatgaccatgaaaatccgtaactag

SEQ ID NO: 310 - DNA, 714 bp, synthetic construct; identical to SEQ ID NO: 304
  misc_feature 1..714: note = Synthetic
  source 1..714: mol_type = other DNA

SEQ ID NO: 311 - DNA, 1926 bp, synthetic construct
  misc_feature 1..1926: note = Synthetic
  source 1..1926: mol_type = other DNA
atggacatgagggtgcccgctcagctcctggggctcctgctgctgtggctgagaggtgcgcgctgtgaggtgcaggtgttggagtctgggggaggcttggtacagcctggggagtccctgagactctcctgtacagcctctggattcacctttaacgcctatgccatgagctgggtccgccaggctccagggaaggggctggagtgggtgtcaactattagtggtagtggtagtaccacatactacgcagactccgtgaagggccggttcaccatctccagagacaattccaagaacacgctggatctgcaaatgaacagcctgagagccgcggacacggccgtatattactgtgcgaaagttgctggaagtaactttttctttgaccactggggccagggaaccctggttaccgtgtcctcagcctccaccaagggcccatcggtcttccccctggcaccctcctccaagagcacctctgggggcacagcggccctgggctgcctggtcaaggactacttccccgaaccggtgacggtgtcgtggaactcaggcgccctgaccagcggcgtgcacaccttcccggctgtcctacagtcctcaggactctactccctcagcagcgtggtgaccgtgccctccagcagcttgggcacccagacctacatctgcaacgtgaatcacaagcccagcaacaccaaggtggacaagaaagttgagcccaaatcttgtgacaaaactcacacatgcccaccgtgcccagcacctgaactcctggggggaccgtcagtcttcctcttccccccaaaacccaaggacaccctcatgatctcccggacccctgaggtcacatgcgtggtggtggacgtgagccacgaagaccctgaggtcaagttcaactggtacgtggacggcgtggaggtgcataatgccaagacaaagccgtgcgaggagcagtacggcagcacgtaccgttgcgtcagcgtcctcaccgtcctgcaccaggactggctgaatggcaaggagtacaagtgcaaggtgtccaacaaagccctcccagcccccatcgagaaaaccatctccaaagccaaagggcagccccgagaaccacaggtgtacaccctgcccccatcccgggaggagatgaccaagaaccaggtcagcctgacctgcctggtcaaaggcttctatcccagcgacatcgccgtggagtgggagagcaatgggcagccggagaacaactacaagaccacgcctcccgtgctggactccgacggctccttcttcctctatagcaagctcaccgtggacaagagcaggtggcagcaggggaacgtcttctcatgctccgtgatgcatgaggctctgcacaaccactacacgcagaagagcctctccctgtctcccgggggaggcggtggatcctctccaggtcaaggtactcaatccgaaaactcctgcacccacttcccgggtaacctgccgaacatgctgcgtgacctgcgtgacgctttctcccgtgttaaaaccttcttccggatgaaagaccagctggacaacctgctgctgaaagaatccctgctggaagacttcaaaggttacctgggttgtcaggctctgtccgaaatgatccagttctacctggaagaagttatgccgcaggctgaaaaccaggacccggacatcaaagctcacgttaactccctgggtgaaaacctgaaaaccctgcgtctgcgtctgcgccgttgccatcgattcctgccgtgcgaaaacggtggcggttctggtggtaaatccaaagctgttgaacaggttaaaaacgctttcaacaaactgcaggaaaaaggtatctacaaagctatgtccgaattcgacatcttcatcaactacatcgaagcttacatgaccatgaaaatccgtaactag

SEQ ID NO: 312 - DNA, 714 bp, synthetic construct; identical to SEQ ID NO: 304
  misc_feature 1..714: note = Synthetic
  source 1..714: mol_type = other DNA

SEQ ID NO: 313 - DNA, 1926 bp, synthetic construct
  misc_feature 1..1926: note = Synthetic
  source 1..1926: mol_type = other DNA
atggacatgagggtgcccgctcagctcctggggctcctgctgctgtggctgagaggtgcgcgctgtgaggtgcaggtgttggagtctgggggaggcttggtacagcctggggagtccctgagactctcctgtacagcctctggattcacctttaacgcctatgccatgagctgggtccgccaggctccagggaaggggctggagtgggtgtcaactattagtggtagtggtagtaccacatactacgcagactccgtgaagggccggttcaccatctccagagacaattccaagaacacgctggatctgcaaatgaacagcctgagagccgcggacacggccgtatattactgtgcgaaagttgctggaagtaactttttctttgaccactggggccagggaaccctggttaccgtgtcctcagcctccaccaagggcccatcggtcttccccctggcaccctcctccaagagcacctctgggggcacagcggccctgggctgcctggtcaaggactacttccccgaaccggtgacggtgtcgtggaactcaggcgccctgaccagcggcgtgcacaccttcccggctgtcctacagtcctcaggactctactccctcagcagcgtggtgaccgtgccctccagcagcttgggcacccagacctacatctgcaacgtgaatcacaagcccagcaacaccaaggtggacaagaaagttgagcccaaatcttgtgacaaaactcacacatgcccaccgtgcccagcacctgaactcctggggggaccgtcagtcttcctcttccccccaaaacccaaggacaccctcatgatctcccggacccctgaggtcacatgcgtggtggtggacgtgagccacgaagaccctgaggtcaagttcaactggtacgtggacggcgtggaggtgcataatgccaagacaaagccgtgcgaggagcagtacggcagcacgtaccgttgcgtcagcgtcctcaccgtcctgcaccaggactggctgaatggcaaggagtacaagtgcaaggtgtccaacaaagccctcccagcccccatcgagaaaaccatctccaaagccaaagggcagccccgagaaccacaggtgtacaccctgcccccatcccgggaggagatgaccaagaaccaggtcagcctgacctgcctggtcaaaggcttctatcccagcgacatcgccgtggagtgggagagcaatgggcagccggagaacaactacaagaccacgcctcccgtgctggactccgacggctccttcttcctctatagcaagctcaccgtggacaagagcaggtggcagcaggggaacgtcttctcatgctccgtgatgcatgaggctctgcacaaccactacacgcagaagagcctctccctgtctcccgggggaggcggtggatcctctccaggtcaaggtactcaatccgaaaactcctgcacccacttcccgggtaacctgccgaacatgctgcgtgacctgcgtgacgctttctcccgtgttaaaaccttcttccagatgaaagaccagctggacaacaagctgctgaaagaatccctgctggaagacttcaaaggttacctgggttgtcaggctctgtccgaaatgatccagttctacctggaagaagttatgccgcaggctgaaaaccaggacccggacatcaaagctcacgttaactccctgggtgaaaacctgaaaaccctgcgtctgcgtctgcgccgttgccatcgattcctgccgtgcgaaaacggtggcggttctggtggtaaatccaaagctgttgaacaggttaaaaacgctttcaacaaactgcaggaaaaaggtatctacaaagctatgtccgaattcgacatcttcatcaactacatcgaagcttacatgaccatgaaaatccgtaactag

SEQ ID NO: 314 - DNA, 714 bp, synthetic construct; identical to SEQ ID NO: 304
  misc_feature 1..714: note = Synthetic
  source 1..714: mol_type = other DNA

SEQ ID NO: 315 - DNA, 1926 bp, synthetic construct
  misc_feature 1..1926: note = Synthetic
  source 1..1926: mol_type = other DNA
atggacatgagggtgcccgctcagctcctggggctcctgctgctgtggctgagaggtgcgcgctgtgaggtgcaggtgttggagtctgggggaggcttggtacagcctggggagtccctgagactctcctgtacagcctctggattcacctttaacgcctatgccatgagctgggtccgccaggctccagggaaggggctggagtgggtgtcaactattagtggtagtggtagtaccacatactacgcagactccgtgaagggccggttcaccatctccagagacaattccaagaacacgctggatctgcaaatgaacagcctgagagccgcggacacggccgtatattactgtgcgaaagttgctggaagtaactttttctttgaccactggggccagggaaccctggttaccgtgtcctcagcctccaccaagggcccatcggtcttccccctggcaccctcctccaagagcacctctgggggcacagcggccctgggctgcctggtcaaggactacttccccgaaccggtgacggtgtcgtggaactcaggcgccctgaccagcggcgtgcacaccttcccggctgtcctacagtcctcaggactctactccctcagcagcgtggtgaccgtgccctccagcagcttgggcacccagacctacatctgcaacgtgaatcacaagcccagcaacaccaaggtggacaagaaagttgagcccaaatcttgtgacaaaactcacacatgcccaccgtgcccagcacctgaactcctggggggaccgtcagtcttcctcttccccccaaaacccaaggacaccctcatgatctcccggacccctgaggtcacatgcgtggtggtggacgtgagccacgaagaccctgaggtcaagttcaactggtacgtggacggcgtggaggtgcataatgccaagacaaagccgtgcgaggagcagtacggcagcacgtaccgttgcgtcagcgtcctcaccgtcctgcaccaggactggctgaatggcaaggagtacaagtgcaaggtgtccaacaaagccctcccagcccccatcgagaaaaccatctccaaagccaaagggcagccccgagaaccacaggtgtacaccctgcccccatcccgggaggagatgaccaagaaccaggtcagcctgacctgcctggtcaaaggcttctatcccagcgacatcgccgtggagtgggagagcaatgggcagccggagaacaactacaagaccacgcctcccgtgctggactccgacggctccttcttcctctatagcaagctcaccgtggacaagagcaggtggcagcaggggaacgtcttctcatgctccgtgatgcatgaggctctgcacaaccactacacgcagaagagcctctccctgtctcccgggggaggcggtggatcctctccaggtcaaggtactcaatccgaaaactcctgcacccacttcccgggtaacctgccgaacatgctgcgtgacctgcgtgacgctttctcccgtgttgacaccttcttccagatgaaagaccagctggacaacctgctgctgaaagaatccctgctggaagacttcaaaggttacctgggttgtcaggctctgtccgaaatgatccagttctacctggaagaagttatgccgcaggctgaaaaccaggacccggacatcaaagctcacgttaactccctgggtgaaaacctgaaaaccctgcgtctgcgtctgcgccgttgccatcgattcctgccgtgcgaaaacggtggcggttctggtggtaaatccaaagctgttgaacaggttaaaaacgctttcaacaaactgcaggaaaaaggtatctacaaagctatgtccgaattcgacatcttcatcaactacatcgaagcttacatgaccatgaaaatccgtaactag

SEQ ID NO: 316 - DNA, 714 bp, synthetic construct; identical to SEQ ID NO: 304
  misc_feature 1..714: note = Synthetic
  source 1..714: mol_type = other DNA

SEQ ID NO: 317 - DNA, 1926 bp, synthetic construct
  misc_feature 1..1926: note = Synthetic
  source 1..1926: mol_type = other DNA
atggacatgagggtgcccgctcagctcctggggctcctgctgctgtggctgagaggtgcgcgctgtgaggtgcaggtgttggagtctgggggaggcttggtacagcctggggagtccctgagactctcctgtacagcctctggattcacctttaacgcctatgccatgagctgggtccgccaggctccagggaaggggctggagtgggtgtcaactattagtggtagtggtagtaccacatactacgcagactccgtgaagggccggttcaccatctccagagacaattccaagaacacgctggatctgcaaatgaacagcctgagagccgcggacacggccgtatattactgtgcgaaagttgctggaagtaactttttctttgaccactggggccagggaaccctggttaccgtgtcctcagcctccaccaagggcccatcggtcttccccctggcaccctcctccaagagcacctctgggggcacagcggccctgggctgcctggtcaaggactacttccccgaaccggtgacggtgtcgtggaactcaggcgccctgaccagcggcgtgcacaccttcccggctgtcctacagtcctcaggactctactccctcagcagcgtggtgaccgtgccctccagcagcttgggcacccagacctacatctgcaacgtgaatcacaagcccagcaacaccaaggtggacaagaaagttgagcccaaatcttgtgacaaaactcacacatgcccaccgtgcccagcacctgaactcctggggggaccgtcagtcttcctcttccccccaaaacccaaggacaccctcatgatctcccggacccctgaggtcacatgcgtggtggtggacgtgagccacgaagaccctgaggtcaagttcaactggtacgtggacggcgtggaggtgcataatgccaagacaaagccgtgcgaggagcagtacggcagcacgtaccgttgcgtcagcgtcctcaccgtcctgcaccaggactggctgaatggcaaggagtacaagtgcaaggtgtccaacaaagccctcccagcccccatcgagaaaaccatctccaaagccaaagggcagccccgagaaccacaggtgtacaccctgcccccatcccgggaggagatgaccaagaaccaggtcagcctgacctgcctggtcaaaggcttctatcccagcgacatcgccgtggagtgggagagcaatgggcagccggagaacaactacaagaccacgcctcccgtgctggactccgacggctccttcttcctctatagcaagctcaccgtggacaagagcaggtggcagcaggggaacgtcttctcatgctccgtgatgcatgaggctctgcacaaccactacacgcagaagagcctctccctgtctcccgggggaggcggtggatcctctccaggtcaaggtactcaatccgaaaactcctgcacccacttcccgggtaacctgccgaacatgctgcgtgacctgcgtgacgctttctcccgtgttaaaaccttcttcgagatgaaagaccagctggacaacctgctgctgaaagaatccctgctggaagacttcaaaggttacctgggttgtcaggctctgtccgaaatgatccagttctacctggaagaagttatgccgcaggctgaaaaccaggacccggacatcaaagctcacgttaactccctgggtgaaaacctgaaaaccctgcgtctgcgtctgcgccgttgccatcgattcctgccgtgcgaaaacggtggcggttctggtggtaaatccaaagctgttgaacaggttaaaaacgctttcaacaaactgcaggaaaaaggtatctacaaagctatgtccgaattcgacatcttcatcaactacatcgaagcttacatgaccatgaaaatccgtaactag

SEQ ID NO: 318 - DNA, 714 bp, synthetic construct; identical to SEQ ID NO: 304
  misc_feature 1..714: note = Synthetic
  source 1..714: mol_type = other DNA

SEQ ID NO: 319 - DNA, 1926 bp, synthetic construct
  misc_feature 1..1926: note = Synthetic
  source 1..1926: mol_type = other DNA
atggacatgagggtgcccgctcagctcctggggctcctgctgctgtggctgagaggtgcgcgctgtgaggtgcagctgttggagtctgggggaggcttggtacagcctggggggtccctgagactctcctgtgcagcctctggattcacctttagcacctatgccatgaactgggtccgccaggctccagggaaggggctggagtgggtgtcaactgttagtggtagtggtcgtcccacatactacgcagactccgtgaagggccggttcaccatctccagagacaattccaagaacacgctgtatctgcaaatgaacagcctgagagccgaggacacggccgtttattactgtgcgaaggcctactacagtaactacctttttgactactggggccagggaaccctggtcaccgtgtcctcagcctccaccaagggcccatcggtcttccccctggcaccctcctccaagagcacctctgggggcacagcggccctgggctgcctggtcaaggactacttccccgaaccggtgacggtgtcgtggaactcaggcgccctgaccagcggcgtgcacaccttcccggctgtcctacagtcctcaggactctactccctcagcagcgtggtgaccgtgccctccagcagcttgggcacccagacctacatctgcaacgtgaatcacaagcccagcaacaccaaggtggacaagaaagttgagcccaaatcttgtgacaaaactcacacatgcccaccgtgcccagcacctgaactcctggggggaccgtcagtcttcctcttccccccaaaacccaaggacaccctcatgatctcccggacccctgaggtcacatgcgtggtggtggacgtgagccacgaagaccctgaggtcaagttcaactggtacgtggacggcgtggaggtgcataatgccaagacaaagccgtgcgaggagcagtacggcagcacgtaccgttgcgtcagcgtcctcaccgtcctgcaccaggactggctgaatggcaaggagtacaagtgcaaggtgtccaacaaagccctcccagcccccatcgagaaaaccatctccaaagccaaagggcagccccgagaaccacaggtgtacaccctgcccccatcccgggaggagatgaccaagaaccaggtcagcctgacctgcctggtcaaaggcttctatcccagcgacatcgccgtggagtgggagagcaatgggcagccggagaacaactacaagaccacgcctcccgtgctggactccgacggctccttcttcctctatagcaagctcaccgtggacaagagcaggtggcagcaggggaacgtcttctcatgctccgtgatgcatgaggctctgcacaaccactacacgcagaagagcctctccctgtctcccgggggaggcggtggatcctctccaggtcaaggtactcaatccgaaaactcctgcacccacttcccgggtaacctgccgaacatgctgcgtgacctgcttgacgctttctcccgtgttaaaaccttcttccagatgaaagaccagctggacaacctgctgctgaaagaatccctgctggaagacttcaaaggttacctgggttgtcaggctctgtccgaaatgatccagttctacctggaagaagttatgccgcaggctgaaaaccaggacccggacatcaaagctcacgttaactccctgggtgaaaacctgaaaaccctgcgtctgcgtctgcgccgttgccatcgattcctgccgtgcgaaaacggtggcggttctggtggtaaatccaaagctgttgaacaggttaaaaacgctttcaacaaactgcaggaaaaaggtatctacaaagctatgtccgaattcgacatcttcatcaactacatcgaagcttacatgaccatgaaaatccgtaactag

SEQ ID NO: 320 - DNA, 714 bp, synthetic construct
  misc_feature 1..714: note = Synthetic
  source 1..714: mol_type = other DNA
atggacatgagggtgcccgctcagctcctggggctcctgctgctgtggctgagaggtgcgcgctgtgaaatcgtgatgacgcagtctccagccatcctgtctgtgtctccaggggaaagagccaccctctcctgcagggccagtcagagtgttagcagcaacttagcctggtaccagcagaaacctggccaggctcccaggctcctcatctatggtgcatccaccagggccacgggtgtcccagccaggttcagtggcggtgggtctgggacagacttcactctcaccatcagcagcctgcagtctgaagattttgcagtttattactgtcagcacttcaagacctggcctccgctcactttcggcggagggaccaaggtggagatcaaacgaacggtggctgcaccatctgtcttcatcttcccgccatctgatgagcagttgaaatctggaactgcctctgttgtgtgcctgctgaataacttctatcccagagaggccaaagtacagtggaaggtggataacgccctccaatcgggtaactcccaggagagtgtcacagagcaggacagcaaggacagcacctacagcctcagcagcaccctgacgctgagcaaagcagactacgagaaacacaaagtctacgcctgcgaagtcacccatcagggcctgagctcgcccgtcacaaagagcttcaacaggggagagtgttag

SEQ ID NO: 321 - DNA, 1926 bp, synthetic construct
  misc_feature 1..1926: note = Synthetic
  source 1..1926: mol_type = other DNA
atggacatgagggtgcccgctcagctcctggggctcctgctgctgtggctgagaggtgcgcgctgtgaggtgcagctgttggagtctgggggaggcttggtacagcctggggggtccctgagactctcctgtgcagcctctggattcacctttagcacctatgccatgaactgggtccgccaggctccagggaaggggctggagtgggtgtcaactgttagtggtagtggtcgtcccacatactacgcagactccgtgaagggccggttcaccatctccagagacaattccaagaacacgctgtatctgcaaatgaacagcctgagagccgaggacacggccgtttattactgtgcgaaggcctactacagtaactacctttttgactactggggccagggaaccctggtcaccgtgtcctcagcctccaccaagggcccatcggtcttccccctggcaccctcctccaagagcacctctgggggcacagcggccctgggctgcctggtcaaggactacttccccgaaccggtgacggtgtcgtggaactcaggcgccctgaccagcggcgtgcacaccttcccggctgtcctacagtcctcaggactctactccctcagcagcgtggtgaccgtgccctccagcagcttgggcacccagacctacatctgcaacgtgaatcacaagcccagcaacaccaaggtggacaagaaagttgagcccaaatcttgtgacaaaactcacacatgcccaccgtgcccagcacctgaactcctggggggaccgtcagtcttcctcttccccccaaaacccaaggacaccctcatgatctcccggacccctgaggtcacatgcgtggtggtggacgtgagccacgaagaccctgaggtcaagttcaactggtacgtggacggcgtggaggtgcataatgccaagacaaagccgtgcgaggagcagtacggcagcacgtaccgttgcgtcagcgtcctcaccgtcctgcaccaggactggctgaatggcaaggagtacaagtgcaaggtgtccaacaaagccctcccagcccccatcgagaaaaccatctccaaagccaaagggcagccccgagaaccacaggtgtacaccctgcccccatcccgggaggagatgaccaagaaccaggtcagcctgacctgcctggtcaaaggcttctatcccagcgacatcgccgtggagtgggagagcaatgggcagccggagaacaactacaagaccacgcctcccgtgctggactccgacggctccttcttcctctatagcaagctcaccgtggacaagagcaggtggcagcaggggaacgtcttctcatgctccgtgatgcatgaggctctgcacaaccactacacgcagaagagcctctccctgtctcccgggggaggcggtggatcctctccaggtcaaggtactcaatccgaaaactcctgcacccacttcccgggtaacctgccgaacatgctgcgtgacctgcgtgacgctttctcccgtgttaaaaccttcttccagatgaaagaccagctggacaacctgctgctgaaagaatccctgctggaagacttcaaaggttacctgggttgtcaggctctgtccgaaatgatccagttctacctggaagaagttatgccgcaggctgaaaaccaggacccggacatcaaagctcacgttaactccctgggtgaaaacctgaaaaccctgcgtctgcgtctgcgccgttgccatcgattcctgccgtgcgaaaacggtggcggttctggtggtaaatccaaagctgttgaacaggttaaaaacgctttcaacaaactgcaggaaaaaggtatctacttagctatgtccgaattcgacatcttcatcaactacatcgaagcttacatgaccatgaaaatccgtaactag

SEQ ID NO: 322 - DNA, 714 bp, synthetic construct; identical to SEQ ID NO: 320
  misc_feature 1..714: note = Synthetic
  source 1..714: mol_type = other DNA

SEQ ID NO: 323 - DNA, 1926 bp, synthetic construct
  misc_feature 1..1926: note = Synthetic
  source 1..1926: mol_type = other DNA
atggacatgagggtgcccgctcagctcctggggctcctgctgctgtggctgagaggtgcgcgctgtgaggtgcagctgttggagtctgggggaggcttggtacagcctggggggtccctgagactctcctgtgcagcctctggattcacctttagcacctatgccatgaactgggtccgccaggctccagggaaggggctggagtgggtgtcaactgttagtggtagtggtcgtcccacatactacgcagactccgtgaagggccggttcaccatctccagagacaattccaagaacacgctgtatctgcaaatgaacagcctgagagccgaggacacggccgtttattactgtgcgaaggcctactacagtaactacctttttgactactggggccagggaaccctggtcaccgtgtcctcagcctccaccaagggcccatcggtcttccccctggcaccctcctccaagagcacctctgggggcacagcggccctgggctgcctggtcaaggactacttccccgaaccggtgacggtgtcgtggaactcaggcgccctgaccagcggcgtgcacaccttcccggctgtcctacagtcctcaggactctactccctcagcagcgtggtgaccgtgccctccagcagcttgggcacccagacctacatctgcaacgtgaatcacaagcccagcaacaccaaggtggacaagaaagttgagcccaaatcttgtgacaaaactcacacatgcccaccgtgcccagcacctgaactcctggggggaccgtcagtcttcctcttccccccaaaacccaaggacaccctcatgatctcccggacccctgaggtcacatgcgtggtggtggacgtgagccacgaagaccctgaggtcaagttcaactggtacgtggacggcgtggaggtgcataatgccaagacaaagccgtgcgaggagcagtacggcagcacgtaccgttgcgtcagcgtcctcaccgtcctgcaccaggactggctgaatggcaaggagtacaagtgcaaggtgtccaacaaagccctcccagcccccatcgagaaaaccatctccaaagccaaagggcagccccgagaaccacaggtgtacaccctgcccccatcccgggaggagatgaccaagaaccaggtcagcctgacctgcctggtcaaaggcttctatcccagcgacatcgccgtggagtgggagagcaatgggcagccggagaacaactacaagaccacgcctcccgtgctggactccgacggctccttcttcctctatagcaagctcaccgtggacaagagcaggtggcagcaggggaacgtcttctcatgctccgtgatgcatgaggctctgcacaaccactacacgcagaagagcctctccctgtctcccgggggaggcggtggatcctctccaggtcaaggtactcaatccgaaaactcctgcacccacttcccgggtaacctgccgaacatgctgcgtgacctgcgtgacgctttctcccgtgttaaaaccttcttccagatgaaagaccagctggacaacctgctgctgaaagaatccctgctggaagacttcaaaggttacctgggttgtcaggctctgtccgaaatgatccagttctacctggaagaagttatgccgcaggctgaaaaccaggacccggacatcaaagctcacgttaactccctgggtgaaaacctgaaaaccctgcgtctgcgtctgcgccgttgccatcgattcctgccgtgcgaaaacggtggcggttctggtggtaaatccaaagctgttgaacaggttaaaaacgctttcaacaaactgcaggaaaaaggtatctacgacgctatgtccgaattcgacatcttcatcaactacatcgaagcttacatgaccatgaaaatccgtaactag

SEQ ID NO: 324 - DNA, 714 bp, synthetic construct; identical to SEQ ID NO: 320
  misc_feature 1..714: note = Synthetic
  source 1..714: mol_type = other DNA

SEQ ID NO: 325 - DNA, 1926 bp, synthetic construct
  misc_feature 1..1926: note = Synthetic
  source 1..1926: mol_type = other DNA
atggacatgagggtgcccgctcagctcctggggctcctgctgctgtggctgagaggtgcgcgctgtgaggtgcagctgttggagtctgggggaggcttggtacagcctggggggtccctgagactctcctgtgcagcctctggattcacctttagcacctatgccatgaactgggtccgccaggctccagggaaggggctggagtgggtgtcaactgttagtggtagtggtcgtcccacatactacgcagactccgtgaagggccggttcaccatctccagagacaattccaagaacacgctgtatctgcaaatgaacagcctgagagccgaggacacggccgtttattactgtgcgaaggcctactacagtaactacctttttgactactggggccagggaaccctggtcaccgtgtcctcagcctccaccaagggcccatcggtcttccccctggcaccctcctccaagagcacctctgggggcacagcggccctgggctgcctggtcaaggactacttccccgaaccggtgacggtgtcgtggaactcaggcgccctgaccagcggcgtgcacaccttcccggctgtcctacagtcctcaggactctactccctcagcagcgtggtgaccgtgccctccagcagcttgggcacccagacctacatctgcaacgtgaatcacaagcccagcaacaccaaggtggacaagaaagttgagcccaaatcttgtgacaaaactcacacatgcccaccgtgcccagcacctgaactcctggggggaccgtcagtcttcctcttccccccaaaacccaaggacaccctcatgatctcccggacccctgaggtcacatgcgtggtggtggacgtgagccacgaagaccctgaggtcaagttcaactggtacgtggacggcgtggaggtgcataatgccaagacaaagccgtgcgaggagcagtacggcagcacgtaccgttgcgtcagcgtcctcaccgtcctgcaccaggactggctgaatggcaaggagtacaagtgcaaggtgtccaacaaagccctcccagcccccatcgagaaaaccatctccaaagccaaagggcagccccgagaaccacaggtgtacaccctgcccccatcccgggaggagatgaccaagaaccaggtcagcctgacctgcctggtcaaaggcttctatcccagcgacatcgccgtggagtgggagagcaatgggcagccggagaacaactacaagaccacgcctcccgtgctggactccgacggctccttcttcctctatagcaagctcaccgtggacaagagcaggtggcagcaggggaacgtcttctcatgctccgtgatgcatgaggctctgcacaaccactacacgcagaagagcctctccctgtctcccgggggaggcggtggatcctctccaggtcaaggtactcaatccgaaaactcctgcacccacttcccgggtaacctgccgaacatgctgcgtgacctgcgtgacgctttctcccgtgttaaaaccttcttccagatgaaaggccagctggacaacctgctgctgaaagaatccctgctggaagacttcaaaggttacctgggttgtcaggctctgtccgaaatgatccagttctacctggaagaagttatgccgcaggctgaaaaccaggacccggacatcaaagctcacgttaactccctgggtgaaaacctgaaaaccctgcgtctgcgtctgcgccgttgccatcgattcctgccgtgcgaaaacggtggcggttctggtggtaaatccaaagctgttgaacaggttaaaaacgctttcaacaaactgcaggaaaaaggtatctacaaagctatgtccgaattcgacatcttcatcaactacatcgaagcttacatgaccatgaaaatccgtaactag

SEQ ID NO: 326 - DNA, 714 bp, synthetic construct; identical to SEQ ID NO: 320
  misc_feature 1..714: note = Synthetic
  source 1..714: mol_type = other DNA

SEQ ID NO: 327 - DNA, 1926 bp, synthetic construct
  misc_feature 1..1926: note = Synthetic
  source 1..1926: mol_type = other DNA
atggacatgagggtgcccgctcagctcctggggctcctgctgctgtggctgagaggtgcgcgctgtgaggtgcagctgttggagtctgggggaggcttggtacagcctggggggtccctgagactctcctgtgcagcctctggattcacctttagcacctatgccatgaactgggtccgccaggctccagggaaggggctggagtgggtgtcaactgttagtggtagtggtcgtcccacatactacgcagactccgtgaagggccggttcaccatctccagagacaattccaagaacacgctgtatctgcaaatgaacagcctgagagccgaggacacggccgtttattactgtgcgaaggcctactacagtaactacctttttgactactggggccagggaaccctggtcaccgtgtcctcagcctccaccaagggcccatcggtcttccccctggcaccctcctccaagagcacctctgggggcacagcggccctgggctgcctggtcaaggactacttccccgaaccggtgacggtgtcgtggaactcaggcgccctgaccagcggcgtgcacaccttcccggctgtcctacagtcctcaggactctactccctcagcagcgtggtgaccgtgccctccagcagcttgggcacccagacctacatctgcaacgtgaatcacaagcccagcaacaccaaggtggacaagaaagttgagcccaaatcttgtgacaaaactcacacatgcccaccgtgcccagcacctgaactcctggggggaccgtcagtcttcctcttccccccaaaacccaaggacaccctcatgatctcccggacccctgaggtcacatgcgtggtggtggacgtgagccacgaagaccctgaggtcaagttcaactggtacgtggacggcgtggaggtgcataatgccaagacaaagccgtgcgaggagcagtacggcagcacgtaccgttgcgtcagcgtcctcaccgtcctgcaccaggactggctgaatggcaaggagtacaagtgcaaggtgtccaacaaagccctcccagcccccatcgagaaaaccatctccaaagccaaagggcagccccgagaaccacaggtgtacaccctgcccccatcccgggaggagatgaccaagaaccaggtcagcctgacctgcctggtcaaaggcttctatcccagcgacatcgccgtggagtgggagagcaatgggcagccggagaacaactacaagaccacgcctcccgtgctggactccgacggctccttcttcctctatagcaagctcaccgtggacaagagcaggtggcagcaggggaacgtcttctcatgctccgtgatgcatgaggctctgcacaaccactacacgcagaagagcctctccctgtctcccgggggaggcggtggatcctctccaggtcaaggtactcaatccgaaaactcctgcacccacttcccgggtaacctgccgaacatgctgcgtgacctgcgtgacgctttctcccgtgttaaaaccttcttccggatgaaagaccagctggacaacctgctgctgaaagaatccctgctggaagacttcaaaggttacctgggttgtcaggctctgtccgaaatgatccagttctacctggaagaagttatgccgcaggctgaaaaccaggacccggacatcaaagctcacgttaactccctgggtgaaaacctgaaaaccctgcgtctgcgtctgcgccgttgccatcgattcctgccgtgcgaaaacggtggcggttctggtggtaaatccaaagctgttgaacaggttaaaaacgctttcaacaaactgcaggaaaaaggtatctacaaagctatgtccgaattcgacatcttcatcaactacatcgaagcttacatgaccatgaaaatccgtaactag

SEQ ID NO: 328 - DNA, 714 bp, synthetic construct; identical to SEQ ID NO: 320
  misc_feature 1..714: note = Synthetic
  source 1..714: mol_type = other DNA

SEQ ID NO: 329 - DNA, 1926 bp, synthetic construct
  misc_feature 1..1926: note = Synthetic
  source 1..1926: mol_type = other DNA
atggacatgagggtgcccgctcagctcctggggctcctgctgctgtggctgagaggtgcgcgctgtgaggtgcagctgttggagtctgggggaggcttggtacagcctggggggtccctgagactctcctgtgcagcctctggattcacctttagcacctatgccatgaactgggtccgccaggctccagggaaggggctggagtgggtgtcaactgttagtggtagtggtcgtcccacatactacgcagactccgtgaagggccggttcaccatctccagagacaattccaagaacacgctgtatctgcaaatgaacagcctgagagccgaggacacggccgtttattactgtgcgaaggcctactacagtaactacctttttgactactggggccagggaaccctggtcaccgtgtcctcagcctccaccaagggcccatcggtcttccccctggcaccctcctccaagagcacctctgggggcacagcggccctgggctgcctggtcaaggactacttccccgaaccggtgacggtgtcgtggaactcaggcgccctgaccagcggcgtgcacaccttcccggctgtcctacagtcctcaggactctactccctcagcagcgtggtgaccgtgccctccagcagcttgggcacccagacctacatctgcaacgtgaatcacaagcccagcaacaccaaggtggacaagaaagttgagcccaaatcttgtgacaaaactcacacatgcccaccgtgcccagcacctgaactcctggggggaccgtcagtcttcctcttccccccaaaacccaaggacaccctcatgatctcccggacccctgaggtcacatgcgtggtggtggacgtgagccacgaagaccctgaggtcaagttcaactggtacgtggacggcgtggaggtgcataatgccaagacaaagccgtgcgaggagcagtacggcagcacgtaccgttgcgtcagcgtcctcaccgtcctgcaccaggactggctgaatggcaaggagtacaagtgcaaggtgtccaacaaagccctcccagcccccatcgagaaaaccatctccaaagccaaagggcagccccgagaaccacaggtgtacaccctgcccccatcccgggaggagatgaccaagaaccaggtcagcctgacctgcctggtcaaaggcttctatcccagcgacatcgccgtggagtgggagagcaatgggcagccggagaacaactacaagaccacgcctcccgtgctggactccgacggctccttcttcctctatagcaagctcaccgtggacaagagcaggtggcagcaggggaacgtcttctcatgctccgtgatgcatgaggctctgcacaaccactacacgcagaagagcctctccctgtctcccgggggaggcggtggatcctctccaggtcaaggtactcaatccgaaaactcctgcacccacttcccgggtaacctgccgaacatgctgcgtgacctgcgtgacgctttctcccgtgttaaaaccttcttccagatgaaagaccagctggacaacaagctgctgaaagaatccctgctggaagacttcaaaggttacctgggttgtcaggctctgtccgaaatgatccagttctacctggaagaagttatgccgcaggctgaaaaccaggacccggacatcaaagctcacgttaactccctgggtgaaaacctgaaaaccctgcgtctgcgtctgcgccgttgccatcgattcctgccgtgcgaaaacggtggcggttctggtggtaaatccaaagctgttgaacaggttaaaaacgctttcaacaaactgcaggaaaaaggtatctacaaagctatgtccgaattcgacatcttcatcaactacatcgaagcttacatgaccatgaaaatccgtaactag

SEQ ID NO: 330 - DNA, 714 bp, synthetic construct; identical to SEQ ID NO: 320
  misc_feature 1..714: note = Synthetic
  source 1..714: mol_type = other DNA

SEQ ID NO: 331 - DNA, 1926 bp, synthetic construct
  misc_feature 1..1926: note = Synthetic
  source 1..1926: mol_type = other DNA
atggacatgagggtgcccgctcagctcctggggctcctgctgctgtggctgagaggtgcgcgctgtgaggtgcagctgttggagtctgggggaggcttggtacagcctggggggtccctgagactctcctgtgcagcctctggattcacctttagcacctatgccatgaactgggtccgccaggctccagggaaggggctggagtgggtgtcaactgttagtggtagtggtcgtcccacatactacgcagactccgtgaagggccggttcaccatctccagagacaattccaagaacacgctgtatctgcaaatgaacagcctgagagccgaggacacggccgtttattactgtgcgaaggcctactacagtaactacctttttgactactggggccagggaaccctggtcaccgtgtcctcagcctccaccaagggcccatcggtcttccccctggcaccctcctccaagagcacctctgggggcacagcggccctgggctgcctggtcaaggactacttccccgaaccggtgacggtgtcgtggaactcaggcgccctgaccagcggcgtgcacaccttcccggctgtcctacagtcctcaggactctactccctcagcagcgtggtgaccgtgccctccagcagcttgggcacccagacctacatctgcaacgtgaatcacaagcccagcaacaccaaggtggacaagaaagttgagcccaaatcttgtgacaaaactcacacatgcccaccgtgcccagcacctgaactcctggggggaccgtcagtcttcctcttccccccaaaacccaaggacaccctcatgatctcccggacccctgaggtcacatgcgtggtggtggacgtgagccacgaagaccctgaggtcaagttcaactggtacgtggacggcgtggaggtgcataatgccaagacaaagccgtgcgaggagcagtacggcagcacgtaccgttgcgtcagcgtcctcaccgtcctgcaccaggactggctgaatggcaaggagtacaagtgcaaggtgtccaacaaagccctcccagcccccatcgagaaaaccatctccaaagccaaagggcagccccgagaaccacaggtgtacaccctgcccccatcccgggaggagatgaccaagaaccaggtcagcctgacctgcctggtcaaaggcttctatcccagcgacatcgccgtggagtgggagagcaatgggcagccggagaacaactacaagaccacgcctcccgtgctggactccgacggctccttcttcctctatagcaagctcaccgtggacaagagcaggtggcagcaggggaacgtcttctcatgctccgtgatgcatgaggctctgcacaaccactacacgcagaagagcctctccctgtctcccgggggaggcggtggatcctctccaggtcaaggtactcaatccgaaaactcctgcacccacttcccgggtaacctgccgaacatgctgcgtgacctgcgtgacgctttctcccgtgttgacaccttcttccagatgaaagaccagctggacaacctgctgctgaaagaatccctgctggaagacttcaaaggttacctgggttgtcaggctctgtccgaaatgatccagttctacctggaagaagttatgccgcaggctgaaaaccaggacccggacatcaaagctcacgttaactccctgggtgaaaacctgaaaaccctgcgtctgcgtctgcgccgttgccatcgattcctgccgtgcgaaaacggtggcggttctggtggtaaatccaaagctgttgaacaggttaaaaacgctttcaacaaactgcaggaaaaaggtatctacaaagctatgtccgaattcgacatcttcatcaactacatcgaagcttacatgaccatgaaaatccgtaactag

SEQ ID NO: 332 - DNA, 714 bp, synthetic construct; identical to SEQ ID NO: 320
  misc_feature 1..714: note = Synthetic
  source 1..714: mol_type = other DNA

SEQ ID NO: 333 - DNA, 1926 bp, synthetic construct
  misc_feature 1..1926: note = Synthetic
  source 1..1926: mol_type = other DNA
atggacatgagggtgcccgctcagctcctggggctcctgctgctgtggctgagaggtgcgcgctgtgaggtgcagctgttggagtctgggggaggcttggtacagcctggggggtccctgagactctcctgtgcagcctctggattcacctttagcacctatgccatgaactgggtccgccaggctccagggaaggggctggagtgggtgtcaactgttagtggtagtggtcgtcccacatactacgcagactccgtgaagggccggttcaccatctccagagacaattccaagaacacgctgtatctgcaaatgaacagcctgagagccgaggacacggccgtttattactgtgcgaaggcctactacagtaactacctttttgactactggggccagggaaccctggtcaccgtgtcctcagcctccaccaagggcccatcggtcttccccctggcaccctcctccaagagcacctctgggggcacagcggccctgggctgcctggtcaaggactacttccccgaaccggtgacggtgtcgtggaactcaggcgccctgaccagcggcgtgcacaccttcccggctgtcctacagtcctcaggactctactccctcagcagcgtggtgaccgtgccctccagcagcttgggcacccagacctacatctgcaacgtgaatcacaagcccagcaacaccaaggtggacaagaaagttgagcccaaatcttgtgacaaaactcacacatgcccaccgtgcccagcacctgaactcctggggggaccgtcagtcttcctcttccccccaaaacccaaggacaccctcatgatctcccggacccctgaggtcacatgcgtggtggtggacgtgagccacgaagaccctgaggtcaagttcaactggtacgtggacggcgtggaggtgcataatgccaagacaaagccgtgcgaggagcagtacggcagcacgtaccgttgcgtcagcgtcctcaccgtcctgcaccaggactggctgaatggcaaggagtacaagtgcaaggtgtccaacaaagccctcccagcccccatcgagaaaaccatctccaaagccaaagggcagccccgagaaccacaggtgtacaccctgcccccatcccgggaggagatgaccaagaaccaggtcagcctgacctgcctggtcaaaggcttctatcccagcgacatcgccgtggagtgggagagcaatgggcagccggagaacaactacaagaccacgcctcccgtgctggactccgacggctccttcttcctctatagcaagctcaccgtggacaagagcaggtggcagcaggggaacgtcttctcatgctccgtgatgcatgaggctctgcacaaccactacacgcagaagagcctctccctgtctcccgggggaggcggtggatcctctccaggtcaaggtactcaatccgaaaactcctgcacccacttcccgggtaacctgccgaacatgctgcgtgacctgcgtgacgctttctcccgtgttaaaaccttcttcgagatgaaagaccagctggacaacctgctgctgaaagaatccctgctggaagacttcaaaggttacctgggttgtcaggctctgtccgaaatgatccagttctacctggaagaagttatgccgcaggctgaaaaccaggacccggacatcaaagctcacgttaactccctgggtgaaaacctgaaaaccctgcgtctgcgtctgcgccgttgccatcgattcctgccgtgcgaaaacggtggcggttctggtggtaaatccaaagctgttgaacaggttaaaaacgctttcaacaaactgcaggaaaaaggtatctacaaagctatgtccgaattcgacatcttcatcaactacatcgaagcttacatgaccatgaaaatccgtaactag

SEQ ID NO: 334 - DNA, 714 bp, synthetic construct; identical to SEQ ID NO: 320
  misc_feature 1..714: note = Synthetic
  source 1..714: mol_type = other DNA

SEQ ID NO: 335 - DNA, 1926 bp, synthetic construct
  misc_feature 1..1926: note = Synthetic
  source 1..1926: mol_type = other DNA
atggacatgagggtgcccgctcagctcctggggctcctgctgctgtggctgagaggtgcgcgctgtgaggtgcagctgttggagtctgggggaggcatggtacagccgggggggtccctgagactctcctgtgcagtctctggattcacctttagtcgctatgccatgagctgggtccgccaggctccagggaaggggctggagtgggtgtcagaaatgaggggtagtagtggtagcacatactacgcagactccgtgaagggccggttcaccatctccagagacaattccaagaacacgctgtatctgcaaatgaacagcctgagagtcgaggacacggccatctattactgtgcgaaagaatttagcagcaactccctctttgactactggggccagggaaccctggtcaccgtgtcctcagcctccaccaagggcccatcggtcttccccctggcaccctcctccaagagcacctctgggggcacagcggccctgggctgcctggtcaaggactacttccccgaaccggtgacggtgtcgtggaactcaggcgccctgaccagcggcgtgcacaccttcccggctgtcctacagtcctcaggactctactccctcagcagcgtggtgaccgtgccctccagcagcttgggcacccagacctacatctgcaacgtgaatcacaagcccagcaacaccaaggtggacaagaaagttgagcccaaatcttgtgacaaaactcacacatgcccaccgtgcccagcacctgaactcctggggggaccgtcagtcttcctcttccccccaaaacccaaggacaccctcatgatctcccggacccctgaggtcacatgcgtggtggtggacgtgagccacgaagaccctgaggtcaagttcaactggtacgtggacggcgtggaggtgcataatgccaagacaaagccgtgcgaggagcagtacggcagcacgtaccgttgcgtcagcgtcctcaccgtcctgcaccaggactggctgaatggcaaggagtacaagtgcaaggtgtccaacaaagccctcccagcccccatcgagaaaaccatctccaaagccaaagggcagccccgagaaccacaggtgtacaccctgcccccatcccgggaggagatgaccaagaaccaggtcagcctgacctgcctggtcaaaggcttctatcccagcgacatcgccgtggagtgggagagcaatgggcagccggagaacaactacaagaccacgcctcccgtgctggactccgacggctccttcttcctctatagcaagctcaccgtggacaagagcaggtggcagcaggggaacgtcttctcatgctccgtgatgcatgaggctctgcacaaccactacacgcagaagagcctctccctgtctcccgggggaggcggtggatcctctccaggtcaaggtactcaatccgaaaactcctgcacccacttcccgggtaacctgccgaacatgctgcgtgacctgcttgacgctttctcccgtgttaaaaccttcttccagatgaaagaccagctggacaacctgctgctgaaagaatccctgctggaagacttcaaaggttacctgggttgtcaggctctgtccgaaatgatccagttctacctggaagaagttatgccgcaggctgaaaaccaggacccggacatcaaagctcacgttaactccctgggtgaaaacctgaaaaccctgcgtctgcgtctgcgccgttgccatcgattcctgccgtgcgaaaacggtggcggttctggtggtaaatccaaagctgttgaacaggttaaaaacgctttcaacaaactgcaggaaaaaggtatctacaaagctatgtccgaattcgacatcttcatcaactacatcgaagcttacatgaccatgaaaatccgtaactag

SEQ ID NO: 336 - DNA, 714 bp, synthetic construct
  misc_feature 1..714: note = Synthetic
  source 1..714: mol_type = other DNA
atggacatgagggtgcccgctcagctcctggggctcctgctgctgtggctgagaggtgcgcgctgtgaaatcgtgatgacgcagtctccagccaccctgtctgtgtctccaggggaaagagccaccctctcctgcagggccagtcagagtgttaacagcaacttagcctggtaccagcagaaacctggccgggctcccaggctcctcatctatggtgcatccaccagggccactggtatcccagccaggttcagtggcagtgggtctgggacagagttcactctcaccatcagcagcctgcagtctgaagattttgcagtttattactgtcagcagttttataactggcctccgtggacgttcggccaggggaccaaggtggaaatcaaacgaacggtggctgcaccatctgtcttcatcttcccgccatctgatgagcagttgaaatctggaactgcctctgttgtgtgcctgctgaataacttctatcccagagaggccaaagtacagtggaaggtggataacgccctccaatcgggtaactcccaggagagtgtcacagagcaggacagcaaggacagcacctacagcctcagcagcaccctgacgctgagcaaagcagactacgagaaacacaaagtctacgcctgcgaagtcacccatcagggcctgagctcgcccgtcacaaagagcttcaacaggggagagtgttag

SEQ ID NO: 337 - DNA, 1926 bp, synthetic construct
  misc_feature 1..1926: note = Synthetic
  source 1..1926: mol_type = other DNA
atggacatgagggtgcccgctcagctcctggggctcctgctgctgtggctgagaggtgcgcgctgtgaggtgcagctgttggagtctgggggaggcatggtacagccgggggggtccctgagactctcctgtgcagtctctggattcacctttagtcgctatgccatgagctgggtccgccaggctccagggaaggggctggagtgggtgtcagaaatgaggggtagtagtggtagcacatactacgcagactccgtgaagggccggttcaccatctccagagacaattccaagaacacgctgtatctgcaaatgaacagcctgagagtcgaggacacggccatctattactgtgcgaaagaatttagcagcaactccctctttgactactggggccagggaaccctggtcaccgtgtcctcagcctccaccaagggcccatcggtcttccccctggcaccctcctccaagagcacctctgggggcacagcggccctgggctgcctggtcaaggactacttccccgaaccggtgacggtgtcgtggaactcaggcgccctgaccagcggcgtgcacaccttcccggctgtcctacagtcctcaggactctactccctcagcagcgtggtgaccgtgccctccagcagcttgggcacccagacctacatctgcaacgtgaatcacaagcccagcaacaccaaggtggacaagaaagttgagcccaaatcttgtgacaaaactcacacatgcccaccgtgcccagcacctgaactcctggggggaccgtcagtcttcctcttccccccaaaacccaaggacaccctcatgatctcccggacccctgaggtcacatgcgtggtggtggacgtgagccacgaagaccctgaggtcaagttcaactggtacgtggacggcgtggaggtgcataatgccaagacaaagccgtgcgaggagcagtacggcagcacgtaccgttgcgtcagcgtcctcaccgtcctgcaccaggactggctgaatggcaaggagtacaagtgcaaggtgtccaacaaagccctcccagcccccatcgagaaaaccatctccaaagccaaagggcagccccgagaaccacaggtgtacaccctgcccccatcccgggaggagatgaccaagaaccaggtcagcctgacctgcctggtcaaaggcttctatcccagcgacatcgccgtggagtgggagagcaatgggcagccggagaacaactacaagaccacgcctcccgtgctggactccgacggctccttcttcctctatagcaagctcaccgtggacaagagcaggtggcagcaggggaacgtcttctcatgctccgtgatgcatgaggctctgcacaaccactacacgcagaagagcctctccctgtctcccgggggaggcggtggatcctctccaggtcaaggtactcaatccgaaaactcctgcacccacttcccgggtaacctgccgaacatgctgcgtgacctgcgtgacgctttctcccgtgttaaaaccttcttccagatgaaagaccagctggacaacctgctgctgaaagaatccctgctggaagacttcaaaggttacctgggttgtcaggctctgtccgaaatgatccagttctacctggaagaagttatgccgcaggctgaaaaccaggacccggacatcaaagctcacgttaactccctgggtgaaaacctgaaaaccctgcgtctgcgtctgcgccgttgccatcgattcctgccgtgcgaaaacggtggcggttctggtggtaaatccaaagctgttgaacaggttaaaaacgctttcaacaaactgcaggaaaaaggtatctacttagctatgtccgaattcgacatcttcatcaactacatcgaagcttacatgaccatgaaaatccgtaactag

SEQ ID NO: 338 - DNA, 714 bp, synthetic construct; identical to SEQ ID NO: 336
  misc_feature 1..714: note = Synthetic
  source 1..714: mol_type = other DNA

SEQ ID NO: 339 - DNA, 1926 bp, synthetic construct
  misc_feature 1..1926: note = Synthetic
  source 1..1926: mol_type = other DNA
atggacatgagggtgcccgctcagctcctggggctcctgctgctgtggctgagaggtgcgcgctgtgaggtgcagctgttggagtctgggggaggcatggtacagccgggggggtccctgagactctcctgtgcagtctctggattcacctttagtcgctatgccatgagctgggtccgccaggctccagggaaggggctggagtgggtgtcagaaatgaggggtagtagtggtagcacatactacgcagactccgtgaagggccggttcaccatctccagagacaattccaagaacacgctgtatctgcaaatgaacagcctgagagtcgaggacacggccatctattactgtgcgaaagaatttagcagcaactccctctttgactactggggccagggaaccctggtcaccgtgtcctcagcctccaccaagggcccatcggtcttccccctggcaccctcctccaagagcacctctgggggcacagcggccctgggctgcctggtcaaggactacttccccgaaccggtgacggtgtcgtggaactcaggcgccctgaccagcggcgtgcacaccttcccggctgtcctacagtcctcaggactctactccctcagcagcgtggtgaccgtgccctccagcagcttgggcacccagacctacatctgcaacgtgaatcacaagcccagcaacaccaaggtggacaagaaagttgagcccaaatcttgtgacaaaactcacacatgcccaccgtgcccagcacctgaactcctggggggaccgtcagtcttcctcttccccccaaaacccaaggacaccctcatgatctcccggacccctgaggtcacatgcgtggtggtggacgtgagccacgaagaccctgaggtcaagttcaactggtacgtggacggcgtggaggtgcataatgccaagacaaagccgtgcgaggagcagtacggcagcacgtaccgttgcgtcagcgtcctcaccgtcctgcaccaggactggctgaatggcaaggagtacaagtgcaaggtgtccaacaaagccctcccagcccccatcgagaaaaccatctccaaagccaaagggcagccccgagaaccacaggtgtacaccctgcccccatcccgggaggagatgaccaagaaccaggtcagcctgacctgcctggtcaaaggcttctatcccagcgacatcgccgtggagtgggagagcaatgggcagccggagaacaactacaagaccacgcctcccgtgctggactccgacggctccttcttcctctatagcaagctcaccgtggacaagagcaggtggcagcaggggaacgtcttctcatgctccgtgatgcatgaggctctgcacaaccactacacgcagaagagcctctccctgtctcccgggggaggcggtggatcctctccaggtcaaggtactcaatccgaaaactcctgcacccacttcccgggtaacctgccgaacatgctgcgtgacctgcgtgacgctttctcccgtgttaaaaccttcttccagatgaaagaccagctggacaacctgctgctgaaagaatccctgctggaagacttcaaaggttacctgggttgtcaggctctgtccgaaatgatccagttctacctggaagaagttatgccgcaggctgaaaaccaggacccggacatcaaagctcacgttaactccctgggtgaaaacctgaaaaccctgcgtctgcgtctgcgccgttgccatcgattcctgccgtgcgaaaacggtggcggttctggtggtaaatccaaagctgttgaacaggttaaaaacgctttcaacaaactgcaggaaaaaggtatctacgacgctatgtccgaattcgacatcttcatcaactacatcgaagcttacatgaccatgaaaatccgtaactag

SEQ ID NO: 340 - DNA, 714 bp, synthetic construct; identical to SEQ ID NO: 336
  misc_feature 1..714: note = Synthetic
  source 1..714: mol_type = other DNA

SEQ ID NO: 341 - DNA, 1926 bp, synthetic construct
  misc_feature 1..1926: note = Synthetic
  source 1..1926: mol_type = other DNA
atggacatgagggtgcccgctcagctcctggggctcctgctgctgtggctgagaggtgcgcgctgtgaggtgcagctgttggagtctgggggaggcatggtacagccgggggggtccctgagactctcctgtgcagtctctggattcacctttagtcgctatgccatgagctgggtccgccaggctccagggaaggggctggagtgggtgtcagaaatgaggggtagtagtggtagcacatactacgcagactccgtgaagggccggttcaccatctccagagacaattccaagaacacgctgtatctgcaaatgaacagcctgagagtcgaggacacggccatctattactgtgcgaaagaatttagcagcaactccctctttgactactggggccagggaaccctggtcaccgtgtcctcagcctccaccaagggcccatcggtcttccccctggcaccctcctccaagagcacctctgggggcacagcggccctgggctgcctggtcaaggactacttccccgaaccggtgacggtgtcgtggaactcaggcgccctgaccagcggcgtgcacaccttcccggctgtcctacagtcctcaggactctactccctcagcagcgtggtgaccgtgccctccagcagcttgggcacccagacctacatctgcaacgtgaatcacaagcccagcaacaccaaggtggacaagaaagttgagcccaaatcttgtgacaaaactcacacatgcccaccgtgcccagcacctgaactcctggggggaccgtcagtcttcctcttccccccaaaacccaaggacaccctcatgatctcccggacccctgaggtcacatgcgtggtggtggacgtgagccacgaagaccctgaggtcaagttcaactggtacgtggacggcgtggaggtgcataatgccaagacaaagccgtgcgaggagcagtacggcagcacgtaccgttgcgtcagcgtcctcaccgtcctgcaccaggactggctgaatggcaaggagtacaagtgcaaggtgtccaacaaagccctcccagcccccatcgagaaaaccatctccaaagccaaagggcagccccgagaaccacaggtgtacaccctgcccccatcccgggaggagatgaccaagaaccaggtcagcctgacctgcctggtcaaaggcttctatcccagcgacatcgccgtggagtgggagagcaatgggcagccggagaacaactacaagaccacgcctcccgtgctggactccgacggctccttcttcctctatagcaagctcaccgtggacaagagcaggtggcagcaggggaacgtcttctcatgctccgtgatgcatgaggctctgcacaaccactacacgcagaagagcctctccctgtctcccgggggaggcggtggatcctctccaggtcaaggtactcaatccgaaaactcctgcacccacttcccgggtaacctgccgaacatgctgcgtgacctgcgtgacgctttctcccgtgttaaaaccttcttccagatgaaaggccagctggacaacctgctgctgaaagaatccctgctggaagacttcaaaggttacctgggttgtcaggctctgtccgaaatgatccagttctacctggaagaagttatgccgcaggctgaaaaccaggacccggacatcaaagctcacgttaactccctgggtgaaaacctgaaaaccctgcgtctgcgtctgcgccgttgccatcgattcctgccgtgcgaaaacggtggcggttctggtggtaaatccaaagctgttgaacaggttaaaaacgctttcaacaaactgcaggaaaaaggtatctacaaagctatgtccgaattcgacatcttcatcaactacatcgaagcttacatgaccatgaaaatccgtaactag

SEQ ID NO: 342 - DNA, 714 bp, synthetic construct; identical to SEQ ID NO: 336
  misc_feature 1..714: note = Synthetic
  source 1..714: mol_type = other DNA

SEQ ID NO: 343 - DNA, 1926 bp, synthetic construct
  misc_feature 1..1926: note = Synthetic
  source 1..1926: mol_type = other DNA
atggacatgagggtgcccgctcagctcctggggctcctgctgctgtggctgagaggtgcgcgctgtgaggtgcagctgttggagtctgggggaggcatggtacagccgggggggtccctgagactctcctgtgcagtctctggattcacctttagtcgctatgccatgagctgggtccgccaggctccagggaaggggctggagtgggtgtcagaaatgaggggtagtagtggtagcacatactacgcagactccgtgaagggccggttcaccatctccagagacaattccaagaacacgctgtatctgcaaatgaacagcctgagagtcgaggacacggccatctattactgtgcgaaagaatttagcagcaactccctctttgactactggggccagggaaccctggtcaccgtgtcctcagcctccaccaagggcccatcggtcttccccctggcaccctcctccaagagcacctctgggggcacagcggccctgggctgcctggtcaaggactacttccccgaaccggtgacggtgtcgtggaactcaggcgccctgaccagcggcgtgcacaccttcccggctgtcctacagtcctcaggactctactccctcagcagcgtggtgaccgtgccctccagcagcttgggcacccagacctacatctgcaacgtgaatcacaagcccagcaacaccaaggtggacaagaaagttgagcccaaatcttgtgacaaaactcacacatgcccaccgtgcccagcacctgaactcctggggggaccgtcagtcttcctcttccccccaaaacccaaggacaccctcatgatctcccggacccctgaggtcacatgcgtggtggtggacgtgagccacgaagaccctgaggtcaagttcaactggtacgtggacggcgtggaggtgcataatgccaagacaaagccgtgcgaggagcagtacggcagcacgtaccgttgcgtcagcgtcctcaccgtcctgcaccaggactggctgaatggcaaggagtacaagtgcaaggtgtccaacaaagccctcccagcccccatcgagaaaaccatctccaaagccaaagggcagccccgagaaccacaggtgtacaccctgcccccatcccgggaggagatgaccaagaaccaggtcagcctgacctgcctggtcaaaggcttctatcccagcgacatcgccgtggagtgggagagcaatgggcagccggagaacaactacaagaccacgcctcccgtgctggactccgacggctccttcttcctctatagcaagctcaccgtggacaagagcaggtggcagcaggggaacgtcttctcatgctccgtgatgcatgaggctctgcacaaccactacacgcagaagagcctctccctgtctcccgggggaggcggtggatcctctccaggtcaaggtactcaatccgaaaactcctgcacccacttcccgggtaacctgccgaacatgctgcgtgacctgcgtgacgctttctcccgtgttaaaaccttcttccggatgaaagaccagctggacaacctgctgctgaaagaatccctgctggaagacttcaaaggttacctgggttgtcaggctctgtccgaaatgatccagttctacctggaagaagttatgccgcaggctgaaaaccaggacccggacatcaaagctcacgttaactccctgggtgaaaacctgaaaaccctgcgtctgcgtctgcgccgttgccatcgattcctgccgtgcgaaaacggtggcggttctggtggtaaatccaaagctgttgaacaggttaaaaacgctttcaacaaactgcaggaaaaaggtatctacaaagctatgtccgaattcgacatcttcatcaactacatcgaagcttacatgaccatgaaaatccgtaactag

SEQ ID NO: 344 - DNA, 714 bp, synthetic construct; identical to SEQ ID NO: 336
  misc_feature 1..714: note = Synthetic
  source 1..714: mol_type = other DNA

SEQ ID NO: 345 - DNA, 1926 bp, synthetic construct
  misc_feature 1..1926: note = Synthetic
  source 1..1926: mol_type = other DNA
atggacatgagggtgcccgctcagctcctggggctcctgctgctgtggctgagaggtgcgcgctgtgaggtgcagctgttggagtctgggggaggcatggtacagccgggggggtccctgagactctcctgtgcagtctctggattcacctttagtcgctatgccatgagctgggtccgccaggctccagggaaggggctggagtgggtgtcagaaatgaggggtagtagtggtagcacatactacgcagactccgtgaagggccggttcaccatctccagagacaattccaagaacacgctgtatctgcaaatgaacagcctgagagtcgaggacacggccatctattactgtgcgaaagaatttagcagcaactccctctttgactactggggccagggaaccctggtcaccgtgtcctcagcctccaccaagggcccatcggtcttccccctggcaccctcctccaagagcacctctgggggcacagcggccctgggctgcctggtcaaggactacttccccgaaccggtgacggtgtcgtggaactcaggcgccctgaccagcggcgtgcacaccttcccggctgtcctacagtcctcaggactctactccctcagcagcgtggtgaccgtgccctccagcagcttgggcacccagacctacatctgcaacgtgaatcacaagcccagcaacaccaaggtggacaagaaagttgagcccaaatcttgtgacaaaactcacacatgcccaccgtgcccagcacctgaactcctggggggaccgtcagtcttcctcttccccccaaaacccaaggacaccctcatgatctcccggacccctgaggtcacatgcgtggtggtggacgtgagccacgaagaccctgaggtcaagttcaactggtacgtggacggcgtggaggtgcataatgccaagacaaagccgtgcgaggagcagtacggcagcacgtaccgttgcgtcagcgtcctcaccgtcctgcaccaggactggctgaatggcaaggagtacaagtgcaaggtgtccaacaaagccctcccagcccccatcgagaaaaccatctccaaagccaaagggcagccccgagaaccacaggtgtacaccctgcccccatcccgggaggagatgaccaagaaccaggtcagcctgacctgcctggtcaaaggcttctatcccagcgacatcgccgtggagtgggagagcaatgggcagccggagaacaactacaagaccacgcctcccgtgctggactccgacggctccttcttcctctatagcaagctcaccgtggacaagagcaggtggcagcaggggaacgtcttctcatgctccgtgatgcatgaggctctgcacaaccactacacgcagaagagcctctccctgtctcccgggggaggcggtggatcctctccaggtcaaggtactcaatccgaaaactcctgcacccacttcccgggtaacctgccgaacatgctgcgtgacctgcgtgacgctttctcccgtgttaaaaccttcttccagatgaaagaccagctggacaacaagctgctgaaagaatccctgctggaagacttcaaaggttacctgggttgtcaggctctgtccgaaatgatccagttctacctggaagaagttatgccgcaggctgaaaaccaggacccggacatcaaagctcacgttaactccctgggtgaaaacctgaaaaccctgcgtctgcgtctgcgccgttgccatcgattcctgccgtgcgaaaacggtggcggttctggtggtaaatccaaagctgttgaacaggttaaaaacgctttcaacaaactgcaggaaaaaggtatctacaaagctatgtccgaattcgacatcttcatcaactacatcgaagcttacatgaccatgaaaatccgtaactag

SEQ ID NO: 346 - DNA, 714 bp, synthetic construct; identical to SEQ ID NO: 336
  misc_feature 1..714: note = Synthetic
  source 1..714: mol_type = other DNA

SEQ ID NO: 347 - DNA, 1926 bp, synthetic construct
  misc_feature 1..1926: note = Synthetic
  source 1..1926: mol_type = other DNA
atggacatgagggtgcccgctcagctcctggggctcctgctgctgtggctgagaggtgcgcgctgtgaggtgcagctgttggagtctgggggaggcatggtacagccgggggggtccctgagactctcctgtgcagtctctggattcacctttagtcgctatgccatgagctgggtccgccaggctccagggaaggggctggagtgggtgtcagaaatgaggggtagtagtggtagcacatactacgcagactccgtgaagggccggttcaccatctccagagacaattccaagaacacgctgtatctgcaaatgaacagcctgagagtcgaggacacggccatctattactgtgcgaaagaatttagcagcaactccctctttgactactggggccagggaaccctggtcaccgtgtcctcagcctccaccaagggcccatcggtcttccccctggcaccctcctccaagagcacctctgggggcacagcggccctgggctgcctggtcaaggactacttccccgaaccggtgacggtgtcgtggaactcaggcgccctgaccagcggcgtgcacaccttcccggctgtcctacagtcctcaggactctactccctcagcagcgtggtgaccgtgccctccagcagcttgggcacccagacctacatctgcaacgtgaatcacaagcccagcaacaccaaggtggacaagaaagttgagcccaaatcttgtgacaaaactcacacatgcccaccgtgcccagcacctgaactcctggggggaccgtcagtcttcctcttccccccaaaacccaaggacaccctcatgatctcccggacccctgaggtcacatgcgtggtggtggacgtgagccacgaagaccctgaggtcaagttcaactggtacgtggacggcgtggaggtgcataatgccaagacaaagccgtgcgaggagcagtacggcagcacgtaccgttgcgtcagcgtcctcaccgtcctgcaccaggactggctgaatggcaaggagtacaagtgcaaggtgtccaacaaagccctcccagcccccatcgagaaaaccatctccaaagccaaagggcagccccgagaaccacaggtgtacaccctgcccccatcccgggaggagatgaccaagaaccaggtcagcctgacctgcctggtcaaaggcttctatcccagcgacatcgccgtggagtgggagagcaatgggcagccggagaacaactacaagaccacgcctcccgtgctggactccgacggctccttcttcctctatagcaagctcaccgtggacaagagcaggtggcagcaggggaacgtcttctcatgctccgtgatgcatgaggctctgcacaaccactacacgcagaagagcctctccctgtctcccgggggaggcggtggatcctctccaggtcaaggtactcaatccgaaaactcctgcacccacttcccgggtaacctgccgaacatgctgcgtgacctgcgtgacgctttctcccgtgttgacaccttcttccagatgaaagaccagctggacaacctgctgctgaaagaatccctgctggaagacttcaaaggttacctgggttgtcaggctctgtccgaaatgatccagttctacctggaagaagttatgccgcaggctgaaaaccaggacccggacatcaaagctcacgttaactccctgggtgaaaacctgaaaaccctgcgtctgcgtctgcgccgttgccatcgattcctgccgtgcgaaaacggtggcggttctggtggtaaatccaaagctgttgaacaggttaaaaacgctttcaacaaactgcaggaaaaaggtatctacaaagctatgtccgaattcgacatcttcatcaactacatcgaagcttacatgaccatgaaaatccgtaactag

SEQ ID NO: 348 - DNA, 714 bp, synthetic construct; identical to SEQ ID NO: 336
  misc_feature 1..714: note = Synthetic
  source 1..714: mol_type = other DNA

SEQ ID NO: 349 - DNA, 1926 bp, synthetic construct
  misc_feature 1..1926: note = Synthetic
  source 1..1926: mol_type = other DNA
atggacatgagggtgcccgctcagctcctggggctcctgctgctgtggctgagaggtgcgcgctgtgaggtgcagctgttggagtctgggggaggcatggtacagccgggggggtccctgagactctcctgtgcagtctctggattcacctttagtcgctatgccatgagctgggtccgccaggctccagggaaggggctggagtgggtgtcagaaatgaggggtagtagtggtagcacatactacgcagactccgtgaagggccggttcaccatctccagagacaattccaagaacacgctgtatctgcaaatgaacagcctgagagtcgaggacacggccatctattactgtgcgaaagaatttagcagcaactccctctttgactactggggccagggaaccctggtcaccgtgtcctcagcctccaccaagggcccatcggtcttccccctggcaccctcctccaagagcacctctgggggcacagcggccctgggctgcctggtcaaggactacttccccgaaccggtgacggtgtcgtggaactcaggcgccctgaccagcggcgtgcacaccttcccggctgtcctacagtcctcaggactctactccctcagcagcgtggtgaccgtgccctccagcagcttgggcacccagacctacatctgcaacgtgaatcacaagcccagcaacaccaaggtggacaagaaagttgagcccaaatcttgtgacaaaactcacacatgcccaccgtgcccagcacctgaactcctggggggaccgtcagtcttcctcttccccccaaaacccaaggacaccctcatgatctcccggacccctgaggtcacatgcgtggtggtggacgtgagccacgaagaccctgaggtcaagttcaactggtacgtggacggcgtggaggtgcataatgccaagacaaagccgtgcgaggagcagtacggcagcacgtaccgttgcgtcagcgtcctcaccgtcctgcaccaggactggctgaatggcaaggagtacaagtgcaaggtgtccaacaaagccctcccagcccccatcgagaaaaccatctccaaagccaaagggcagccccgagaaccacaggtgtacaccctgcccccatcccgggaggagatgaccaagaaccaggtcagcctgacctgcctggtcaaaggcttctatcccagcgacatcgccgtggagtgggagagcaatgggcagccggagaacaactacaagaccacgcctcccgtgctggactccgacggctccttcttcctctatagcaagctcaccgtggacaagagcaggtggcagcaggggaacgtcttctcatgctccgtgatgcatgaggctctgcacaaccactacacgcagaagagcctctccctgtctcccgggggaggcggtggatcctctccaggtcaaggtactcaatccgaaaactcctgcacccacttcccgggtaacctgccgaacatgctgcgtgacctgcgtgacgctttctcccgtgttaaaaccttcttcgagatgaaagaccagctggacaacctgctgctgaaagaatccctgctggaagacttcaaaggttacctgggttgtcaggctctgtccgaaatgatccagttctacctggaagaagttatgccgcaggctgaaaaccaggacccggacatcaaagctcacgttaactccctgggtgaaaacctgaaaaccctgcgtctgcgtctgcgccgttgccatcgattcctgccgtgcgaaaacggtggcggttctggtggtaaatccaaagctgttgaacaggttaaaaacgctttcaacaaactgcaggaaaaaggtatctacaaagctatgtccgaattcgacatcttcatcaactacatcgaagcttacatgaccatgaaaatccgtaactag

SEQ ID NO: 350 - DNA, 714 bp, synthetic construct; identical to SEQ ID NO: 336
  misc_feature 1..714: note = Synthetic
  source 1..714: mol_type = other DNA

SEQ ID NO: 351 - DNA, 1917 bp, synthetic construct
  misc_feature 1..1917: note = Synthetic
  source 1..1917: mol_type = other DNA
atggacatgagggtgcccgctcagctcctggggctcctgctgctgtggctgagaggtgcgcgctgtgaggtgcagctggtggagtctgggggaggcttggtccagcctggggggtccctgagactctcctgtgcagcctctggattcacctttagcagcaattggatgagctgggtccgccaggctccagggaaggggctggactggatggccagcatgaagcaagatggaagtgagatctactatgtggactctgtgaagggccgattcaccatctccagagacaacgccaagaactcactgcatctgcaaatgaacagcctgagagccgaggacacggctgtgtattactgtgtgagaggagggtggagatttgagtcctggggccagggagccctggtcaccgtgtcctcagcctccaccaagggcccatcggtcttccccctggcaccctcctccaagagcacctctgggggcacagcggccctgggctgcctggtcaaggactacttccccgaaccggtgacggtgtcgtggaactcaggcgccctgaccagcggcgtgcacaccttcccggctgtcctacagtcctcaggactctactccctcagcagcgtggtgaccgtgccctccagcagcttgggcacccagacctacatctgcaacgtgaatcacaagcccagcaacaccaaggtggacaagaaagttgagcccaaatcttgtgacaaaactcacacatgcccaccgtgcccagcacctgaactcctggggggaccgtcagtcttcctcttccccccaaaacccaaggacaccctcatgatctcccggacccctgaggtcacatgcgtggtggtggacgtgagccacgaagaccctgaggtcaagttcaactggtacgtggacggcgtggaggtgcataatgccaagacaaagccgtgcgaggagcagtacggcagcacgtaccgttgcgtcagcgtcctcaccgtcctgcaccaggactggctgaatggcaaggagtacaagtgcaaggtgtccaacaaagccctcccagcccccatcgagaaaaccatctccaaagccaaagggcagccccgagaaccacaggtgtacaccctgcccccatcccgggaggagatgaccaagaaccaggtcagcctgacctgcctggtcaaaggcttctatcccagcgacatcgccgtggagtgggagagcaatgggcagccggagaacaactacaagaccacgcctcccgtgctggactccgacggctccttcttcctctatagcaagctcaccgtggacaagagcaggtggcagcaggggaacgtcttctcatgctccgtgatgcatgaggctctgcacaaccactacacgcagaagagcctctccctgtctcccgggggaggcggtggatcctctccaggtcaaggtactcaatccgaaaactcctgcacccacttcccgggtaacctgccgaacatgctgcgtgacctgcttgacgctttctcccgtgttaaaaccttcttccagatgaaagaccagctggacaacctgctgctgaaagaatccctgctggaagacttcaaaggttacctgggttgtcaggctctgtccgaaatgatccagttctacctggaagaagttatgccgcaggctgaaaaccaggacccggacatcaaagctcacgttaactccctgggtgaaaacctgaaaaccctgcgtctgcgtctgcgccgttgccatcgattcctgccgtgcgaaaacggtggcggttctggtggtaaatccaaagctgttgaacaggttaaaaacgctttcaacaaactgcaggaaaaaggtatctacaaagctatgtccgaattcgacatcttcatcaactacatcgaagcttacatgaccatgaaaatccgtaactag

SEQ ID NO: 352 - DNA, 711 bp, synthetic construct
  misc_feature 1..711: note = Synthetic
  source 1..711: mol_type = other DNA
atggacatgagggtgcccgctcagctcctggggctcctgctgctgtggctgagaggtgcgcgctgtgaaatcgtgatgacgcagtctccagccaccctgtctgtgtctccaggggaaagagccaccctctcctgcagggccagtcagagtgttagcagcaacttagcctggtatcagcagaaatctggccaggctcccaggctcctcatctatggtgcatccatcagggccactggtatcccagccagggtcagcggcagtgggtctgggacagagttcaccttcactatcagcagcctgcagtctgaagattttgcagtctattactgtcagcagtataagaactggcctctcactttcggcggagggaccaaggtggagatcaaacgaacggtggctgcaccatctgtcttcatcttcccgccatctgatgagcagttgaaatctggaactgcctctgttgtgtgcctgctgaataacttctatcccagagaggccaaagtacagtggaaggtggataacgccctccaatcgggtaactcccaggagagtgtcacagagcaggacagcaaggacagcacctacagcctcagcagcaccctgacgctgagcaaagcagactacgagaaacacaaagtctacgcctgcgaagtcacccatcagggcctgagctcgcccgtcacaaagagcttcaacaggggagagtgttag

SEQ ID NO: 353 - DNA, 1917 bp, synthetic construct
  misc_feature 1..1917: note = Synthetic
  source 1..1917: mol_type = other DNA
atggacatgagggtgcccgctcagctcctggggctcctgctgctgtggctgagaggtgcgcgctgtgaggtgcagctggtggagtctgggggaggcttggtccagcctggggggtccctgagactctcctgtgcagcctctggattcacctttagcagcaattggatgagctgggtccgccaggctccagggaaggggctggactggatggccagcatgaagcaagatggaagtgagatctactatgtggactctgtgaagggccgattcaccatctccagagacaacgccaagaactcactgcatctgcaaatgaacagcctgagagccgaggacacggctgtgtattactgtgtgagaggagggtggagatttgagtcctggggccagggagccctggtcaccgtgtcctcagcctccaccaagggcccatcggtcttccccctggcaccctcctccaagagcacctctgggggcacagcggccctgggctgcctggtcaaggactacttccccgaaccggtgacggtgtcgtggaactcaggcgccctgaccagcggcgtgcacaccttcccggctgtcctacagtcctcaggactctactccctcagcagcgtggtgaccgtgccctccagcagcttgggcacccagacctacatctgcaacgtgaatcacaagcccagcaacaccaaggtggacaagaaagttgagcccaaatcttgtgacaaaactcacacatgcccaccgtgcccagcacctgaactcctggggggaccgtcagtcttcctcttccccccaaaacccaaggacaccctcatgatctcccggacccctgaggtcacatgcgtggtggtggacgtgagccacgaagaccctgaggtcaagttcaactggtacgtggacggcgtggaggtgcataatgccaagacaaagccgtgcgaggagcagtacggcagcacgtaccgttgcgtcagcgtcctcaccgtcctgcaccaggactggctgaatggcaaggagtacaagtgcaaggtgtccaacaaagccctcccagcccccatcgagaaaaccatctccaaagccaaagggcagccccgagaaccacaggtgtacaccctgcccccatcccgggaggagatgaccaagaaccaggtcagcctgacctgcctggtcaaaggcttctatcccagcgacatcgccgtggagtgggagagcaatgggcagccggagaacaactacaagaccacgcctcccgtgctggactccgacggctccttcttcctctatagcaagctcaccgtggacaagagcaggtggcagcaggggaacgtcttctcatgctccgtgatgcatgaggctctgcacaaccactacacgcagaagagcctctccctgtctcccgggggaggcggtggatcctctccaggtcaaggtactcaatccgaaaactcctgcacccacttcccgggtaacctgccgaacatgctgcgtgacctgcgtgacgctttctcccgtgttaaaaccttcttccagatgaaagaccagctggacaacctgctgctgaaagaatccctgctggaagacttcaaaggttacctgggttgtcaggctctgtccgaaatgatccagttctacctggaagaagttatgccgcaggctgaaaaccaggacccggacatcaaagctcacgttaactccctgggtgaaaacctgaaaaccctgcgtctgcgtctgcgccgttgccatcgattcctgccgtgcgaaaacggtggcggttctggtggtaaatccaaagctgttgaacaggttaaaaacgctttcaacaaactgcaggaaaaaggtatctacttagctatgtccgaattcgacatcttcatcaactacatcgaagcttacatgaccatgaaaatccgtaactag

SEQ ID NO: 354 - DNA, 711 bp, synthetic construct; identical to SEQ ID NO: 352
  misc_feature 1..711: note = Synthetic
  source 1..711: mol_type = other DNA

SEQ ID NO: 355 - DNA, 1917 bp, synthetic construct
  misc_feature 1..1917: note = Synthetic
  source 1..1917: mol_type = other DNA
atggacatgagggtgcccgctcagctcctggggctcctgctgctgtggctgagaggtgcgcgctgtgaggtgcagctggtggagtctgggggaggcttggtccagcctggggggtccctgagactctcctgtgcagcctctggattcacctttagcagcaattggatgagctgggtccgccaggctccagggaaggggctggactggatggccagcatgaagcaagatggaagtgagatctactatgtggactctgtgaagggccgattcaccatctccagagacaacgccaagaactcactgcatctgcaaatgaacagcctgagagccgaggacacggctgtgtattactgtgtgagaggagggtggagatttgagtcctggggccagggagccctggtcaccgtgtcctcagcctccaccaagggcccatcggtcttccccctggcaccctcctccaagagcacctctgggggcacagcggccctgggctgcctggtcaaggactacttccccgaaccggtgacggtgtcgtggaactcaggcgccctgaccagcggcgtgcacaccttcccggctgtcctacagtcctcaggactctactccctcagcagcgtggtgaccgtgccctccagcagcttgggcacccagacctacatctgcaacgtgaatcacaagcccagcaacaccaaggtggacaagaaagttgagcccaaatcttgtgacaaaactcacacatgcccaccgtgcccagcacctgaactcctggggggaccgtcagtcttcctcttccccccaaaacccaaggacaccctcatgatctcccggacccctgaggtcacatgcgtggtggtggacgtgagccacgaagaccctgaggtcaagttcaactggtacgtggacggcgtggaggtgcataatgccaagacaaagccgtgcgaggagcagtacggcagcacgtaccgttgcgtcagcgtcctcaccgtcctgcaccaggactggctgaatggcaaggagtacaagtgcaaggtgtccaacaaagccctcccagcccccatcgagaaaaccatctccaaagccaaagggcagccccgagaaccacaggtgtacaccctgcccccatcccgggaggagatgaccaagaaccaggtcagcctgacctgcctggtcaaaggcttctatcccagcgacatcgccgtggagtgggagagcaatgggcagccggagaacaactacaagaccacgcctcccgtgctggactccgacggctccttcttcctctatagcaagctcaccgtggacaagagcaggtggcagcaggggaacgtcttctcatgctccgtgatgcatgaggctctgcacaaccactacacgcagaagagcctctccctgtctcccgggggaggcggtggatcctctccaggtcaaggtactcaatccgaaaactcctgcacccacttcccgggtaacctgccgaacatgctgcgtgacctgcgtgacgctttctcccgtgttaaaaccttcttccagatgaaagaccagctggacaacctgctgctgaaagaatccctgctggaagacttcaaaggttacctgggttgtcaggctctgtccgaaatgatccagttctacctggaagaagttatgccgcaggctgaaaaccaggacccggacatcaaagctcacgttaactccctgggtgaaaacctgaaaaccctgcgtctgcgtctgcgccgttgccatcgattcctgccgtgcgaaaacggtggcggttctggtggtaaatccaaagctgttgaacaggttaaaaacgctttcaacaaactgcaggaaaaaggtatctacgacgctatgtccgaattcgacatcttcatcaactacatcgaagcttacatgaccatgaaaatccgtaactag

SEQ ID NO: 356 - DNA, 711 bp, synthetic construct; identical to SEQ ID NO: 352
  misc_feature 1..711: note = Synthetic
  source 1..711: mol_type = other DNA

SEQ ID NO: 357 - DNA, 1917 bp, synthetic construct
  misc_feature 1..1917: note = Synthetic
  source 1..1917: mol_type = other DNA
atggacatgagggtgcccgctcagctcctggggctcctgctgctgtggctgagaggtgcgcgctgtgaggtgcagctggtggagtctgggggaggcttggtccagcctggggggtccctgagactctcctgtgcagcctctggattcacctttagcagcaattggatgagctgggtccgccaggctccagggaaggggctggactggatggccagcatgaagcaagatggaagtgagatctactatgtggactctgtgaagggccgattcaccatctccagagacaacgccaagaactcactgcatctgcaaatgaacagcctgagagccgaggacacggctgtgtattactgtgtgagaggagggtggagatttgagtcctggggccagggagccctggtcaccgtgtcctcagcctccaccaagggcccatcggtcttccccctggcaccctcctccaagagcacctctgggggcacagcggccctgggctgcctggtcaaggactacttccccgaaccggtgacggtgtcgtggaactcaggcgccctgaccagcggcgtgcacaccttcccggctgtcctacagtcctcaggactctactccctcagcagcgtggtgaccgtgccctccagcagcttgggcacccagacctacatctgcaacgtgaatcacaagcccagcaacaccaaggtggacaagaaagttgagcccaaatcttgtgacaaaactcacacatgcccaccgtgcccagcacctgaactcctggggggaccgtcagtcttcctcttccccccaaaacccaaggacaccctcatgatctcccggacccctgaggtcacatgcgtggtggtggacgtgagccacgaagaccctgaggtcaagttcaactggtacgtggacggcgtggaggtgcataatgccaagacaaagccgtgcgaggagcagtacggcagcacgtaccgttgcgtcagcgtcctcaccgtcctgcaccaggactggctgaatggcaaggagtacaagtgcaaggtgtccaacaaagccctcccagcccccatcgagaaaaccatctccaaagccaaagggcagccccgagaaccacaggtgtacaccctgcccccatcccgggaggagatgaccaagaaccaggtcagcctgacctgcctggtcaaaggcttctatcccagcgacatcgccgtggagtgggagagcaatgggcagccggagaacaactacaagaccacgcctcccgtgctggactccgacggctccttcttcctctatagcaagctcaccgtggacaagagcaggtggcagcaggggaacgtcttctcatgctccgtgatgcatgaggctctgcacaaccactacacgcagaagagcctctccctgtctcccgggggaggcggtggatcctctccaggtcaaggtactcaatccgaaaactcctgcacccacttcccgggtaacctgccgaacatgctgcgtgacctgcgtgacgctttctcccgtgttaaaaccttcttccagatgaaaggccagctggacaacctgctgctgaaagaatccctgctggaagacttcaaaggttacctgggttgtcaggctctgtccgaaatgatccagttctacctggaagaagttatgccgcaggctgaaaaccaggacccggacatcaaagctcacgttaactccctgggtgaaaacctgaaaaccctgcgtctgcgtctgcgccgttgccatcgattcctgccgtgcgaaaacggtggcggttctggtggtaaatccaaagctgttgaacaggttaaaaacgctttcaacaaactgcaggaaaaaggtatctacaaagctatgtccgaattcgacatcttcatcaactacatcgaagcttacatgaccatgaaaatccgtaactag

SEQ ID NO: 358 - DNA, 711 bp, synthetic construct; identical to SEQ ID NO: 352
  misc_feature 1..711: note = Synthetic
  source 1..711: mol_type = other DNA

SEQ ID NO: 359 - DNA, 1917 bp, synthetic construct
  misc_feature 1..1917: note = Synthetic
  source 1..1917: mol_type = other DNA
atggacatgagggtgcccgctcagctcctggggctcctgctgctgtggctgagaggtgcgcgctgtgaggtgcagctggtggagtctgggggaggcttggtccagcctggggggtccctgagactctcctgtgcagcctctggattcacctttagcagcaattggatgagctgggtccgccaggctccagggaaggggctggactggatggccagcatgaagcaagatggaagtgagatctactatgtggactctgtgaagggccgattcaccatctccagagacaacgccaagaactcactgcatctgcaaatgaacagcctgagagccgaggacacggctgtgtattactgtgtgagaggagggtggagatttgagtcctggggccagggagccctggtcaccgtgtcctcagcctccaccaagggcccatcggtcttccccctggcaccctcctccaagagcacctctgggggcacagcggccctgggctgcctggtcaaggactacttccccgaaccggtgacggtgtcgtggaactcaggcgccctgaccagcggcgtgcacaccttcccggctgtcctacagtcctcaggactctactccctcagcagcgtggtgaccgtgccctccagcagcttgggcacccagacctacatctgcaacgtgaatcacaagcccagcaacaccaaggtggacaagaaagttgagcccaaatcttgtgacaaaactcacacatgcccaccgtgcccagcacctgaactcctggggggaccgtcagtcttcctcttccccccaaaacccaaggacaccctcatgatctcccggacccctgaggtcacatgcgtggtggtggacgtgagccacgaagaccctgaggtcaagttcaactggtacgtggacggcgtggaggtgcataatgccaagacaaagccgtgcgaggagcagtacggcagcacgtaccgttgcgtcagcgtcctcaccgtcctgcaccaggactggctgaatggcaaggagtacaagtgcaaggtgtccaacaaagccctcccagcccccatcgagaaaaccatctccaaagccaaagggcagccccgagaaccacaggtgtacaccctgcccccatcccgggaggagatgaccaagaaccaggtcagcctgacctgcctggtcaaaggcttctatcccagcgacatcgccgtggagtgggagagcaatgggcagccggagaacaactacaagaccacgcctcccgtgctggactccgacggctccttcttcctctatagcaagctcaccgtggacaagagcaggtggcagcaggggaacgtcttctcatgctccgtgatgcatgaggctctgcacaaccactacacgcagaagagcctctccctgtctcccgggggaggcggtggatcctctccaggtcaaggtactcaatccgaaaactcctgcacccacttcccgggtaacctgccgaacatgctgcgtgacctgcgtgacgctttctcccgtgttaaaaccttcttccggatgaaagaccagctggacaacctgctgctgaaagaatccctgctggaagacttcaaaggttacctgggttgtcaggctctgtccgaaatgatccagttctacctggaagaagttatgccgcaggctgaaaaccaggacccggacatcaaagctcacgttaactccctgggtgaaaacctgaaaaccctgcgtctgcgtctgcgccgttgccatcgattcctgccgtgcgaaaacggtggcggttctggtggtaaatccaaagctgttgaacaggttaaaaacgctttcaacaaactgcaggaaaaaggtatctacaaagctatgtccgaattcgacatcttcatcaactacatcgaagcttacatgaccatgaaaatccgtaactag

SEQ ID NO: 360 - DNA, 711 bp, synthetic construct; identical to SEQ ID NO: 352
  misc_feature 1..711: note = Synthetic
  source 1..711: mol_type = other DNA

SEQ ID NO: 361 - DNA, 1917 bp, synthetic construct
  misc_feature 1..1917: note = Synthetic
  source 1..1917: mol_type = other DNA
atggacatgagggtgcccgctcagctcctggggctcctgctgctgtggctgagaggtgcgcgctgtgaggtgcagctggtggagtctgggggaggcttggtccagcctggggggtccctgagactctcctgtgcagcctctggattcacctttagcagcaattggatgagctgggtccgccaggctccagggaaggggctggactggatggccagcatgaagcaagatggaagtgagatctactatgtggactctgtgaagggccgattcaccatctccagagacaacgccaagaactcactgcatctgcaaatgaacagcctgagagccgaggacacggctgtgtattactgtgtgagaggagggtggagatttgagtcctggggccagggagccctggtcaccgtgtcctcagcctccaccaagggcccatcggtcttccccctggcaccctcctccaagagcacctctgggggcacagcggccctgggctgcctggtcaaggactacttccccgaaccggtgacggtgtcgtggaactcaggcgccctgaccagcggcgtgcacaccttcccggctgtcctacagtcctcaggactctactccctcagcagcgtggtgaccgtgccctccagcagcttgggcacccagacctacatctgcaacgtgaatcacaagcccagcaacaccaaggtggacaagaaagttgagcccaaatcttgtgacaaaactcacacatgcccaccgtgcccagcacctgaactcctggggggaccgtcagtcttcctcttccccccaaaacccaaggacaccctcatgatctcccggacccctgaggtcacatgcgtggtggtggacgtgagccacgaagaccctgaggtcaagttcaactggtacgtggacggcgtggaggtgcataatgccaagacaaagccgtgcgaggagcagtacggcagcacgtaccgttgcgtcagcgtcctcaccgtcctgcaccaggactggctgaatggcaaggagtacaagtgcaaggtgtccaacaaagccctcccagcccccatcgagaaaaccatctccaaagccaaagggcagccccgagaaccacaggtgtacaccctgcccccatcccgggaggagatgaccaagaaccaggtcagcctgacctgcctggtcaaaggcttctatcccagcgacatcgccgtggagtgggagagcaatgggcagccggagaacaactacaagaccacgcctcccgtgctggactccgacggctccttcttcctctatagcaagctcaccgtggacaagagcaggtggcagcaggggaacgtcttctcatgctccgtgatgcatgaggctctgcacaaccactacacgcagaagagcctctccctgtctcccgggggaggcggtggatcctctccaggtcaaggtactcaatccgaaaactcctgcacccacttcccgggtaacctgccgaacatgctgcgtgacctgcgtgacgctttctcccgtgttaaaaccttcttccagatgaaagaccagctggacaacaagctgctgaaagaatccctgctggaagacttcaaaggttacctgggttgtcaggctctgtccgaaatgatccagttctacctggaagaagttatgccgcaggctgaaaaccaggacccggacatcaaagctcacgttaactccctgggtgaaaacctgaaaaccctgcgtctgcgtctgcgccgttgccatcgattcctgccgtgcgaaaacggtggcggttctggtggtaaatccaaagctgttgaacaggttaaaaacgctttcaacaaactgcaggaaaaaggtatctacaaagctatgtccgaattcgacatcttcatcaactacatcgaagcttacatgaccatgaaaatccgtaactag

SEQ ID NO: 362 - DNA, 711 bp, synthetic construct; identical to SEQ ID NO: 352
  misc_feature 1..711: note = Synthetic
  source 1..711: mol_type = other DNA

SEQ ID NO: 363 - DNA, 1917 bp, synthetic construct
  misc_feature 1..1917: note = Synthetic
  source 1..1917: mol_type = other DNA
atggacatgagggtgcccgctcagctcctggggctcctgctgctgtggctgagaggtgcgcgctgtgaggtgcagctggtggagtctgggggaggcttggtccagcctggggggtccctgagactctcctgtgcagcctctggattcacctttagcagcaattggatgagctgggtccgccaggctccagggaaggggctggactggatggccagcatgaagcaagatggaagtgagatctactatgtggactctgtgaagggccgattcaccatctccagagacaacgccaagaactcactgcatctgcaaatgaacagcctgagagccgaggacacggctgtgtattactgtgtgagaggagggtggagatttgagtcctggggccagggagccctggtcaccgtgtcctcagcctccaccaagggcccatcggtcttccccctggcaccctcctccaagagcacctctgggggcacagcggccctgggctgcctggtcaaggactacttccccgaaccggtgacggtgtcgtggaactcaggcgccctgaccagcggcgtgcacaccttcccggctgtcctacagtcctcaggactctactccctcagcagcgtggtgaccgtgccctccagcagcttgggcacccagacctacatctgcaacgtgaatcacaagcccagcaacaccaaggtggacaagaaagttgagcccaaatcttgtgacaaaactcacacatgcccaccgtgcccagcacctgaactcctggggggaccgtcagtcttcctcttccccccaaaacccaaggacaccctcatgatctcccggacccctgaggtcacatgcgtggtggtggacgtgagccacgaagaccctgaggtcaagttcaactggtacgtggacggcgtggaggtgcataatgccaagacaaagccgtgcgaggagcagtacggcagcacgtaccgttgcgtcagcgtcctcaccgtcctgcaccaggactggctgaatggcaaggagtacaagtgcaaggtgtccaacaaagccctcccagcccccatcgagaaaaccatctccaaagccaaagggcagccccgagaaccacaggtgtacaccctgcccccatcccgggaggagatgaccaagaaccaggtcagcctgacctgcctggtcaaaggcttctatcccagcgacatcgccgtggagtgggagagcaatgggcagccggagaacaactacaagaccacgcctcccgtgctggactccgacggctccttcttcctctatagcaagctcaccgtggacaagagcaggtggcagcaggggaacgtcttctcatgctccgtgatgcatgaggctctgcacaaccactacacgcagaagagcctctccctgtctcccgggggaggcggtggatcctctccaggtcaaggtactcaatccgaaaactcctgcacccacttcccgggtaacctgccgaacatgctgcgtgacctgcgtgacgctttctcccgtgttgacaccttcttccagatgaaagaccagctggacaacctgctgctgaaagaatccctgctggaagacttcaaaggttacctgggttgtcaggctctgtccgaaatgatccagttctacctggaagaagttatgccgcaggctgaaaaccaggacccggacatcaaagctcacgttaactccctgggtgaaaacctgaaaaccctgcgtctgcgtctgcgccgttgccatcgattcctgccgtgcgaaaacggtggcggttctggtggtaaatccaaagctgttgaacaggttaaaaacgctttcaacaaactgcaggaaaaaggtatctacaaagctatgtccgaattcgacatcttcatcaactacatcgaagcttacatgaccatgaaaatccgtaactag

SEQ ID NO: 364 - DNA, 711 bp, synthetic construct; identical to SEQ ID NO: 352
  misc_feature 1..711: note = Synthetic
  source 1..711: mol_type = other DNA

SEQ ID NO: 365 - DNA, 1917 bp, synthetic construct
  misc_feature 1..1917: note = Synthetic
  source 1..1917: mol_type = other DNA
atggacatgagggtgcccgctcagctcctggggctcctgctgctgtggctgagaggtgcgcgctgtgaggtgcagctggtggagtctgggggaggcttggtccagcctggggggtccctgagactctcctgtgcagcctctggattcacctttagcagcaattggatgagctgggtccgccaggctccagggaaggggctggactggatggccagcatgaagcaagatggaagtgagatctactatgtggactctgtgaagggccgattcaccatctccagagacaacgccaagaactcactgcatctgcaaatgaacagcctgagagccgaggacacggctgtgtattactgtgtgagaggagggtggagatttgagtcctggggccagggagccctggtcaccgtgtcctcagcctccaccaagggcccatcggtcttccccctggcaccctcctccaagagcacctctgggggcacagcggccctgggctgcctggtcaaggactacttccccgaaccggtgacggtgtcgtggaactcaggcgccctgaccagcggcgtgcacaccttcccggctgtcctacagtcctcaggactctactccctcagcagcgtggtgaccgtgccctccagcagcttgggcacccagacctacatctgcaacgtgaatcacaagcccagcaacaccaaggtggacaagaaagttgagcccaaatcttgtgacaaaactcacacatgcccaccgtgcccagcacctgaactcctggggggaccgtcagtcttcctcttccccccaaaacccaaggacaccctcatgatctcccggacccctgaggtcacatgcgtggtggtggacgtgagccacgaagaccctgaggtcaagttcaactggtacgtggacggcgtggaggtgcataatgccaagacaaagccgtgcgaggagcagtacggcagcacgtaccgttgcgtcagcgtcctcaccgtcctgcaccaggactggctgaatggcaaggagtacaagtgcaaggtgtccaacaaagccctcccagcccccatcgagaaaaccatctccaaagccaaagggcagccccgagaaccacaggtgtacaccctgcccccatcccgggaggagatgaccaagaaccaggtcagcctgacctgcctggtcaaaggcttctatcccagcgacatcgccgtggagtgggagagcaatgggcagccggagaacaactacaagaccacgcctcccgtgctggactccgacggctccttcttcctctatagcaagctcaccgtggacaagagcaggtggcagcaggggaacgtcttctcatgctccgtgatgcatgaggctctgcacaaccactacacgcagaagagcctctccctgtctcccgggggaggcggtggatcctctccaggtcaaggtactcaatccgaaaactcctgcacccacttcccgggtaacctgccgaacatgctgcgtgacctgcgtgacgctttctcccgtgttaaaaccttcttcgagatgaaagaccagctggacaacctgctgctgaaagaatccctgctggaagacttcaaaggttacctgggttgtcaggctctgtccgaaatgatccagttctacctggaagaagttatgccgcaggctgaaaaccaggacccggacatcaaagctcacgttaactccctgggtgaaaacctgaaaaccctgcgtctgcgtctgcgccgttgccatcgattcctgccgtgcgaaaacggtggcggttctggtggtaaatccaaagctgttgaacaggttaaaaacgctttcaacaaactgcaggaaaaaggtatctacaaagctatgtccgaattcgacatcttcatcaactacatcgaagcttacatgaccatgaaaatccgtaactag

SEQ ID NO: 366 - DNA, 711 bp, synthetic construct; identical to SEQ ID NO: 352
  misc_feature 1..711: note = Synthetic
  source 1..711: mol_type = other DNA

SEQ ID NO: 367 - DNA, 1920 bp, synthetic construct
  misc_feature 1..1920: note = Synthetic
  source 1..1920: mol_type = other DNA
atggacatgagggtgcccgctcagctcctggggctcctgctgctgtggctgagaggtgcgcgctgtgaggtgcagctggtggagtctgggggaggcttggtccagccgggggggtccctgagactctcctgtgcagcctctggattcacctttagtagctattggatgagctgggtccgccaggctccagggaaggggctggagtgggtggccaacatcaagcaagatggaagtgaggaatattatgtggactctgtgaagggccgattcaccatctccagagacaacgccaagaactcactgtttctgcaaatgaacagcctgagagccgaggacacggctgtgtattactgtgcgagagactacggtgactcctttgactactggggccagggaaccctggtcaccgtgtcctcagcctccaccaagggcccatcggtcttccccctggcaccctcctccaagagcacctctgggggcacagcggccctgggctgcctggtcaaggactacttccccgaaccggtgacggtgtcgtggaactcaggcgccctgaccagcggcgtgcacaccttcccggctgtcctacagtcctcaggactctactccctcagcagcgtggtgaccgtgccctccagcagcttgggcacccagacctacatctgcaacgtgaatcacaagcccagcaacaccaaggtggacaagaaagttgagcccaaatcttgtgacaaaactcacacatgcccaccgtgcccagcacctgaactcctggggggaccgtcagtcttcctcttccccccaaaacccaaggacaccctcatgatctcccggacccctgaggtcacatgcgtggtggtggacgtgagccacgaagaccctgaggtcaagttcaactggtacgtggacggcgtggaggtgcataatgccaagacaaagccgtgcgaggagcagtacggcagcacgtaccgttgcgtcagcgtcctcaccgtcctgcaccaggactggctgaatggcaaggagtacaagtgcaaggtgtccaacaaagccctcccagcccccatcgagaaaaccatctccaaagccaaagggcagccccgagaaccacaggtgtacaccctgcccccatcccgggaggagatgaccaagaaccaggtcagcctgacctgcctggtcaaaggcttctatcccagcgacatcgccgtggagtgggagagcaatgggcagccggagaacaactacaagaccacgcctcccgtgctggactccgacggctccttcttcctctatagcaagctcaccgtggacaagagcaggtggcagcaggggaacgtcttctcatgctccgtgatgcatgaggctctgcacaaccactacacgcagaagagcctctccctgtctcccgggggaggcggtggatcctctccaggtcaaggtactcaatccgaaaactcctgcacccacttcccgggtaacctgccgaacatgctgcgtgacctgcttgacgctttctcccgtgttaaaaccttcttccagatgaaagaccagctggacaacctgctgctgaaagaatccctgctggaagacttcaaaggttacctgggttgtcaggctctgtccgaaatgatccagttctacctggaagaagttatgccgcaggctgaaaaccaggacccggacatcaaagctcacgttaactccctgggtgaaaacctgaaaaccctgcgtctgcgtctgcgccgttgccatcgattcctgccgtgcgaaaacggtggcggttctggtggtaaatccaaagctgttgaacaggttaaaaacgctttcaacaaactgcaggaaaaaggtatctacaaagctatgtccgaattcgacatcttcatcaactacatcgaagcttacatgaccatgaaaatccgtaactag

SEQ ID NO: 368 - DNA, 711 bp, synthetic construct
  misc_feature 1..711: note = Synthetic
  source 1..711: mol_type = other DNA
atggacatgagggtgcccgctcagctcctggggctcctgctgctgtggctgagaggtgcgcgctgtgacatccagatgacccagtctccatcttccgtgtctgcatctgtaggagacagagtcaccatcacttgtcgggcgagtcagggtattcgcaagtggttagcctggtatcagcagaaaccagggagggcccctaagctcctgatctatgctgcatcccgtttgcaaagtggggtcccatcaaggttcagcggcagtggatctgggacagatttcactctcaccatcagcagcctgcggcctgaagattttgcaacttactattgtcttcaggctcacggtttcccgtggacgttcggccaagggaccaaggtggaaatcaaacgaacggtggctgcaccatctgtcttcatcttcccgccatctgatgagcagttgaaatctggaactgcctctgttgtgtgcctgctgaataacttctatcccagagaggccaaagtacagtggaaggtggataacgccctccaatcgggtaactcccaggagagtgtcacagagcaggacagcaaggacagcacctacagcctcagcagcaccctgacgctgagcaaagcagactacgagaaacacaaagtctacgcctgcgaagtcacccatcagggcctgagctcgcccgtcacaaagagcttcaacaggggagagtgttag

SEQ ID NO: 369 - DNA, 1920 bp, synthetic construct
  misc_feature 1..1920: note = Synthetic
  source 1..1920: mol_type = other DNA
atggacatgagggtgcccgctcagctcctggggctcctgctgctgtggctgagaggtgcgcgctgtgaggtgcagctggtggagtctgggggaggcttggtccagccgggggggtccctgagactctcctgtgcagcctctggattcacctttagtagctattggatgagctgggtccgccaggctccagggaaggggctggagtgggtggccaacatcaagcaagatggaagtgaggaatattatgtggactctgtgaagggccgattcaccatctccagagacaacgccaagaactcactgtttctgcaaatgaacagcctgagagccgaggacacggctgtgtattactgtgcgagagactacggtgactcctttgactactggggccagggaaccctggtcaccgtgtcctcagcctccaccaagggcccatcggtcttccccctggcaccctcctccaagagcacctctgggggcacagcggccctgggctgcctggtcaaggactacttccccgaaccggtgacggtgtcgtggaactcaggcgccctgaccagcggcgtgcacaccttcccggctgtcctacagtcctcaggactctactccctcagcagcgtggtgaccgtgccctccagcagcttgggcacccagacctacatctgcaacgtgaatcacaagcccagcaacaccaaggtggacaagaaagttgagcccaaatcttgtgacaaaactcacacatgcccaccgtgcccagcacctgaactcctggggggaccgtcagtcttcctcttccccccaaaacccaaggacaccctcatgatctcccggacccctgaggtcacatgcgtggtggtggacgtgagccacgaagaccctgaggtcaagttcaactggtacgtggacggcgtggaggtgcataatgccaagacaaagccgtgcgaggagcagtacggcagcacgtaccgttgcgtcagcgtcctcaccgtcctgcaccaggactggctgaatggcaaggagtacaagtgcaaggtgtccaacaaagccctcccagcccccatcgagaaaaccatctccaaagccaaagggcagccccgagaaccacaggtgtacaccctgcccccatcccgggaggagatgaccaagaaccaggtcagcctgacctgcctggtcaaaggcttctatcccagcgacatcgccgtggagtgggagagcaatgggcagccggagaacaactacaagaccacgcctcccgtgctggactccgacggctccttcttcctctatagcaagctcaccgtggacaagagcaggtggcagcaggggaacgtcttctcatgctccgtgatgcatgaggctctgcacaaccactacacgcagaagagcctctccctgtctcccgggggaggcggtggatcctctccaggtcaaggtactcaatccgaaaactcctgcacccacttcccgggtaacctgccgaacatgctgcgtgacctgcgtgacgctttctcccgtgttaaaaccttcttccagatgaaagaccagctggacaacctgctgctgaaagaatccctgctggaagacttcaaaggttacctgggttgtcaggctctgtccgaaatgatccagttctacctggaagaagttatgccgcaggctgaaaaccaggacccggacatcaaagctcacgttaactccctgggtgaaaacctgaaaaccctgcgtctgcgtctgcgccgttgccatcgattcctgccgtgcgaaaacggtggcggttctggtggtaaatccaaagctgttgaacaggttaaaaacgctttcaacaaactgcaggaaaaaggtatctacttagctatgtccgaattcgacatcttcatcaactacatcgaagcttacatgaccatgaaaatccgtaactag

SEQ ID NO: 370 - DNA, 711 bp, synthetic construct; identical to SEQ ID NO: 368
  misc_feature 1..711: note = Synthetic
  source 1..711: mol_type = other DNA

SEQ ID NO: 371 - DNA, 1920 bp, synthetic construct
  misc_feature 1..1920: note = Synthetic
  source 1..1920: mol_type = other DNA
atggacatgagggtgcccgctcagctcctggggctcctgctgctgtggctgagaggtgcgcgctgtgaggtgcagctggtggagtctgggggaggcttggtccagccgggggggtccctgagactctcctgtgcagcctctggattcacctttagtagctattggatgagctgggtccgccaggctccagggaaggggctggagtgggtggccaacatcaagcaagatggaagtgaggaatattatgtggactctgtgaagggccgattcaccatctccagagacaacgccaagaactcactgtttctgcaaatgaacagcctgagagccgaggacacggctgtgtattactgtgcgagagactacggtgactcctttgactactggggccagggaaccctggtcaccgtgtcctcagcctccaccaagggcccatcggtcttccccctggcaccctcctccaagagcacctctgggggcacagcggccctgggctgcctggtcaaggactacttccccgaaccggtgacggtgtcgtggaactcaggcgccctgaccagcggcgtgcacaccttcccggctgtcctacagtcctcaggactctactccctcagcagcgtggtgaccgtgccctccagcagcttgggcacccagacctacatctgcaacgtgaatcacaagcccagcaacaccaaggtggacaagaaagttgagcccaaatcttgtgacaaaactcacacatgcccaccgtgcccagcacctgaactcctggggggaccgtcagtcttcctcttccccccaaaacccaaggacaccctcatgatctcccggacccctgaggtcacatgcgtggtggtggacgtgagccacgaagaccctgaggtcaagttcaactggtacgtggacggcgtggaggtgcataatgccaagacaaagccgtgcgaggagcagtacggcagcacgtaccgttgcgtcagcgtcctcaccgtcctgcaccaggactggctgaatggcaaggagtacaagtgcaaggtgtccaacaaagccctcccagcccccatcgagaaaaccatctccaaagccaaagggcagccccgagaaccacaggtgtacaccctgcccccatcccgggaggagatgaccaagaaccaggtcagcctgacctgcctggtcaaaggcttctatcccagcgacatcgccgtggagtgggagagcaatgggcagccggagaacaactacaagaccacgcctcccgtgctggactccgacggctccttcttcctctatagcaagctcaccgtggacaagagcaggtggcagcaggggaacgtcttctcatgctccgtgatgcatgaggctctgcacaaccactacacgcagaagagcctctccctgtctcccgggggaggcggtggatcctctccaggtcaaggtactcaatccgaaaactcctgcacccacttcccgggtaacctgccgaacatgctgcgtgacctgcgtgacgctttctcccgtgttaaaaccttcttccagatgaaagaccagctggacaacctgctgctgaaagaatccctgctggaagacttcaaaggttacctgggttgtcaggctctgtccgaaatgatccagttctacctggaagaagttatgccgcaggctgaaaaccaggacccggacatcaaagctcacgttaactccctgggtgaaaacctgaaaaccctgcgtctgcgtctgcgccgttgccatcgattcctgccgtgcgaaaacggtggcggttctggtggtaaatccaaagctgttgaacaggttaaaaacgctttcaacaaactgcaggaaaaaggtatctacgacgctatgtccgaattcgacatcttcatcaactacatcgaagcttacatgaccatgaaaatccgtaactag

SEQ ID NO: 372 - DNA, 711 bp, synthetic construct; identical to SEQ ID NO: 368
  misc_feature 1..711: note = Synthetic
  source 1..711: mol_type = other DNA

SEQ ID NO: 373 - DNA, 1920 bp, synthetic construct
  misc_feature 1..1920: note = Synthetic
  source 1..1920: mol_type = other DNA
atggacatgagggtgcccgctcagctcctggggctcctgctgctgtggctgagaggtgcgcgctgtgaggtgcagctggtggagtctgggggaggcttggtccagccgggggggtccctgagactctcctgtgcagcctctggattcacctttagtagctattggatgagctgggtccgccaggctccagggaaggggctggagtgggtggccaacatcaagcaagatggaagtgaggaatattatgtggactctgtgaagggccgattcaccatctccagagacaacgccaagaactcactgtttctgcaaatgaacagcctgagagccgaggacacggctgtgtattactgtgcgagagactacggtgactcctttgactactggggccagggaaccctggtcaccgtgtcctcagcctccaccaagggcccatcggtcttccccctggcaccctcctccaagagcacctctgggggcacagcggccctgggctgcctggtcaaggactacttccccgaaccggtgacggtgtcgtggaactcaggcgccctgaccagcggcgtgcacaccttcccggctgtcctacagtcctcaggactctactccctcagcagcgtggtgaccgtgccctccagcagcttgggcacccagacctacatctgcaacgtgaatcacaagcccagcaacaccaaggtggacaagaaagttgagcccaaatcttgtgacaaaactcacacatgcccaccgtgcccagcacctgaactcctggggggaccgtcagtcttcctcttccccccaaaacccaaggacaccctcatgatctcccggacccctgaggtcacatgcgtggtggtggacgtgagccacgaagaccctgaggtcaagttcaactggtacgtggacggcgtggaggtgcataatgccaagacaaagccgtgcgaggagcagtacggcagcacgtaccgttgcgtcagcgtcctcaccgtcctgcaccaggactggctgaatggcaaggagtacaagtgcaaggtgtccaacaaagccctcccagcccccatcgagaaaaccatctccaaagccaaagggcagccccgagaaccacaggtgtacaccctgcccccatcccgggaggagatgaccaagaaccaggtcagcctgacctgcctggtcaaaggcttctatcccagcgacatcgccgtggagtgggagagcaatgggcagccggagaacaactacaagaccacgcctcccgtgctggactccgacggctccttcttcctctatagcaagctcaccgtggacaagagcaggtggcagcaggggaacgtcttctcatgctccgtgatgcatgaggctctgcacaaccactacacgcagaagagcctctccctgtctcccgggggaggcggtggatcctctccaggtcaaggtactcaatccgaaaactcctgcacccacttcccgggtaacctgccgaacatgctgcgtgacctgcgtgacgctttctcccgtgttaaaaccttcttccagatgaaaggccagctggacaacctgctgctgaaagaatccctgctggaagacttcaaaggttacctgggttgtcaggctctgtccgaaatgatccagttctacctggaagaagttatgccgcaggctgaaaaccaggacccggacatcaaagctcacgttaactccctgggtgaaaacctgaaaaccctgcgtctgcgtctgcgccgttgccatcgattcctgccgtgcgaaaacggtggcggttctggtggtaaatccaaagctgttgaacaggttaaaaacgctttcaacaaactgcaggaaaaaggtatctacaaagctatgtccgaattcgacatcttcatcaactacatcgaagcttacatgaccatgaaaatccgtaactag

SEQ ID NO: 374 - DNA, 711 bp, synthetic construct; identical to SEQ ID NO: 368
  misc_feature 1..711: note = Synthetic
  source 1..711: mol_type = other DNA

SEQ ID NO: 375 - DNA, 1920 bp, synthetic construct
  misc_feature 1..1920: note = Synthetic
  source 1..1920: mol_type = other DNA
atggacatgagggtgcccgctcagctcctggggctcctgctgctgtggctgagaggtgcgcgctgtgaggtgcagctggtggagtctgggggaggcttggtccagccgggggggtccctgagactctcctgtgcagcctctggattcacctttagtagctattggatgagctgggtccgccaggctccagggaaggggctggagtgggtggccaacatcaagcaagatggaagtgaggaatattatgtggactctgtgaagggccgattcaccatctccagagacaacgccaagaactcactgtttctgcaaatgaacagcctgagagccgaggacacggctgtgtattactgtgcgagagactacggtgactcctttgactactggggccagggaaccctggtcaccgtgtcctcagcctccaccaagggcccatcggtcttccccctggcaccctcctccaagagcacctctgggggcacagcggccctgggctgcctggtcaaggactacttccccgaaccggtgacggtgtcgtggaactcaggcgccctgaccagcggcgtgcacaccttcccggctgtcctacagtcctcaggactctactccctcagcagcgtggtgaccgtgccctccagcagcttgggcacccagacctacatctgcaacgtgaatcacaagcccagcaacaccaaggtggacaagaaagttgagcccaaatcttgtgacaaaactcacacatgcccaccgtgcccagcacctgaactcctggggggaccgtcagtcttcctcttccccccaaaacccaaggacaccctcatgatctcccggacccctgaggtcacatgcgtggtggtggacgtgagccacgaagaccctgaggtcaagttcaactggtacgtggacggcgtggaggtgcataatgccaagacaaagccgtgcgaggagcagtacggcagcacgtaccgttgcgtcagcgtcctcaccgtcctgcaccaggactggctgaatggcaaggagtacaagtgcaaggtgtccaacaaagccctcccagcccccatcgagaaaaccatctccaaagccaaagggcagccccgagaaccacaggtgtacaccctgcccccatcccgggaggagatgaccaagaaccaggtcagcctgacctgcctggtcaaaggcttctatcccagcgacatcgccgtggagtgggagagcaatgggcagccggagaacaactacaagaccacgcctcccgtgctggactccgacggctccttcttcctctatagcaagctcaccgtggacaagagcaggtggcagcaggggaacgtcttctcatgctccgtgatgcatgaggctctgcacaaccactacacgcagaagagcctctccctgtctcccgggggaggcggtggatcctctccaggtcaaggtactcaatccgaaaactcctgcacccacttcccgggtaacctgccgaacatgctgcgtgacctgcgtgacgctttctcccgtgttaaaaccttcttccggatgaaagaccagctggacaacctgctgctgaaagaatccctgctggaagacttcaaaggttacctgggttgtcaggctctgtccgaaatgatccagttctacctggaagaagttatgccgcaggctgaaaaccaggacccggacatcaaagctcacgttaactccctgggtgaaaacctgaaaaccctgcgtctgcgtctgcgccgttgccatcgattcctgccgtgcgaaaacggtggcggttctggtggtaaatccaaagctgttgaacaggttaaaaacgctttcaacaaactgcaggaaaaaggtatctacaaagctatgtccgaattcgacatcttcatcaactacatcgaagcttacatgaccatgaaaatccgtaactag

SEQ ID NO: 376 - DNA, 711 bp, synthetic construct; identical to SEQ ID NO: 368
  misc_feature 1..711: note = Synthetic
  source 1..711: mol_type = other DNA

SEQ ID NO: 377 - DNA, 1920 bp, synthetic construct
  misc_feature 1..1920: note = Synthetic
  source 1..1920: mol_type = other DNA
atggacatgagggtgcccgctcagctcctggggctcctgctgctgtggctgagaggtgcgcgctgtgaggtgcagctggtggagtctgggggaggcttggtccagccgggggggtccctgagactctcctgtgcagcctctggattcacctttagtagctattggatgagctgggtccgccaggctccagggaaggggctggagtgggtggccaacatcaagcaagatggaagtgaggaatattatgtggactctgtgaagggccgattcaccatctccagagacaacgccaagaactcactgtttctgcaaatgaacagcctgagagccgaggacacggctgtgtattactgtgcgagagactacggtgactcctttgactactggggccagggaaccctggtcaccgtgtcctcagcctccaccaagggcccatcggtcttccccctggcaccctcctccaagagcacctctgggggcacagcggccctgggctgcctggtcaaggactacttccccgaaccggtgacggtgtcgtggaactcaggcgccctgaccagcggcgtgcacaccttcccggctgtcctacagtcctcaggactctactccctcagcagcgtggtgaccgtgccctccagcagcttgggcacccagacctacatctgcaacgtgaatcacaagcccagcaacaccaaggtggacaagaaagttgagcccaaatcttgtgacaaaactcacacatgcccaccgtgcccagcacctgaactcctggggggaccgtcagtcttcctcttccccccaaaacccaaggacaccctcatgatctcccggacccctgaggtcacatgcgtggtggtggacgtgagccacgaagaccctgaggtcaagttcaactggtacgtggacggcgtggaggtgcataatgccaagacaaagccgtgcgaggagcagtacggcagcacgtaccgttgcgtcagcgtcctcaccgtcctgcaccaggactggctgaatggcaaggagtacaagtgcaaggtgtccaacaaagccctcccagcccccatcgagaaaaccatctccaaagccaaagggcagccccgagaaccacaggtgtacaccctgcccccatcccgggaggagatgaccaagaaccaggtcagcctgacctgcctggtcaaaggcttctatcccagcgacatcgccgtggagtgggagagcaatgggcagccggagaacaactacaagaccacgcctcccgtgctggactccgacggctccttcttcctctatagcaagctcaccgtggacaagagcaggtggcagcaggggaacgtcttctcatgctccgtgatgcatgaggctctgcacaaccactacacgcagaagagcctctccctgtctcccgggggaggcggtggatcctctccaggtcaaggtactcaatccgaaaactcctgcacccacttcccgggtaacctgccgaacatgctgcgtgacctgcgtgacgctttctcccgtgttaaaaccttcttccagatgaaagaccagctggacaacaagctgctgaaagaatccctgctggaagacttcaaaggttacctgggttgtcaggctctgtccgaaatgatccagttctacctggaagaagttatgccgcaggctgaaaaccaggacccggacatcaaagctcacgttaactccctgggtgaaaacctgaaaaccctgcgtctgcgtctgcgccgttgccatcgattcctgccgtgcgaaaacggtggcggttctggtggtaaatccaaagctgttgaacaggttaaaaacgctttcaacaaactgcaggaaaaaggtatctacaaagctatgtccgaattcgacatcttcatcaactacatcgaagcttacatgaccatgaaaatccgtaactag

SEQ ID NO: 378 - DNA, 711 bp, synthetic construct; identical to SEQ ID NO: 368
  misc_feature 1..711: note = Synthetic
  source 1..711: mol_type = other DNA

SEQ ID NO: 379 - DNA, 1920 bp, synthetic construct
  misc_feature 1..1920: note = Synthetic
  source 1..1920: mol_type = other DNA
atggacatgagggtgcccgctcagctcctggggctcctgctgctgtggctgagaggtgcgcgctgtgaggtgcagctggtggagtctgggggaggcttggtccagccgggggggtccctgagactctcctgtgcagcctctggattcacctttagtagctattggatgagctgggtccgccaggctccagggaaggggctggagtgggtggccaacatcaagcaagatggaagtgaggaatattatgtggactctgtgaagggccgattcaccatctccagagacaacgccaagaactcactgtttctgcaaatgaacagcctgagagccgaggacacggctgtgtattactgtgcgagagactacggtgactcctttgactactggggccagggaaccctggtcaccgtgtcctcagcctccaccaagggcccatcggtcttccccctggcaccctcctccaagagcacctctgggggcacagcggccctgggctgcctggtcaaggactacttccccgaaccggtgacggtgtcgtggaactcaggcgccctgaccagcggcgtgcacaccttcccggctgtcctacagtcctcaggactctactccctcagcagcgtggtgaccgtgccctccagcagcttgggcacccagacctacatctgcaacgtgaatcacaagcccagcaacaccaaggtggacaagaaagttgagcccaaatcttgtgacaaaactcacacatgcccaccgtgcccagcacctgaactcctggggggaccgtcagtcttcctcttccccccaaaacccaaggacaccctcatgatctcccggacccctgaggtcacatgcgtggtggtggacgtgagccacgaagaccctgaggtcaagttcaactggtacgtggacggcgtggaggtgcataatgccaagacaaagccgtgcgaggagcagtacggcagcacgtaccgttgcgtcagcgtcctcaccgtcctgcaccaggactggctgaatggcaaggagtacaagtgcaaggtgtccaacaaagccctcccagcccccatcgagaaaaccatctccaaagccaaagggcagccccgagaaccacaggtgtacaccctgcccccatcccgggaggagatgaccaagaaccaggtcagcctgacctgcctggtcaaaggcttctatcccagcgacatcgccgtggagtgggagagcaatgggcagccggagaacaactacaagaccacgcctcccgtgctggactccgacggctccttcttcctctatagcaagctcaccgtggacaagagcaggtggcagcaggggaacgtcttctcatgctccgtgatgcatgaggctctgcacaaccactacacgcagaagagcctctccctgtctcccgggggaggcggtggatcctctccaggtcaaggtactcaatccgaaaactcctgcacccacttcccgggtaacctgccgaacatgctgcgtgacctgcgtgacgctttctcccgtgttgacaccttcttccagatgaaagaccagctggacaacctgctgctgaaagaatccctgctggaagacttcaaaggttacctgggttgtcaggctctgtccgaaatgatccagttctacctggaagaagttatgccgcaggctgaaaaccaggacccggacatcaaagctcacgttaactccctgggtgaaaacctgaaaaccctgcgtctgcgtctgcgccgttgccatcgattcctgccgtgcgaaaacggtggcggttctggtggtaaatccaaagctgttgaacaggttaaaaacgctttcaacaaactgcaggaaaaaggtatctacaaagctatgtccgaattcgacatcttcatcaactacatcgaagcttacatgaccatgaaaatccgtaactag

SEQ ID NO: 380 - DNA, 711 bp, synthetic construct; identical to SEQ ID NO: 368
  misc_feature 1..711: note = Synthetic
  source 1..711: mol_type = other DNA

SEQ ID NO: 381 - DNA, 1920 bp, synthetic construct
  misc_feature 1..1920: note = Synthetic
  source 1..1920: mol_type = other DNA
atggacatgagggtgcccgctcagctcctggggctcctgctgctgtggctgagaggtgcgcgctgtgaggtgcagctggtggagtctgggggaggcttggtccagccgggggggtccctgagactctcctgtgcagcctctggattcacctttagtagctattggatgagctgggtccgccaggctccagggaaggggctggagtgggtggccaacatcaagcaagatggaagtgaggaatattatgtggactctgtgaagggccgattcaccatctccagagacaacgccaagaactcactgtttctgcaaatgaacagcctgagagccgaggacacggctgtgtattactgtgcgagagactacggtgactcctttgactactggggccagggaaccctggtcaccgtgtcctcagcctccaccaagggcccatcggtcttccccctggcaccctcctccaagagcacctctgggggcacagcggccctgggctgcctggtcaaggactacttccccgaaccggtgacggtgtcgtggaactcaggcgccctgaccagcggcgtgcacaccttcccggctgtcctacagtcctcaggactctactccctcagcagcgtggtgaccgtgccctccagcagcttgggcacccagacctacatctgcaacgtgaatcacaagcccagcaacaccaaggtggacaagaaagttgagcccaaatcttgtgacaaaactcacacatgcccaccgtgcccagcacctgaactcctggggggaccgtcagtcttcctcttccccccaaaacccaaggacaccctcatgatctcccggacccctgaggtcacatgcgtggtggtggacgtgagccacgaagaccctgaggtcaagttcaactggtacgtggacggcgtggaggtgcataatgccaagacaaagccgtgcgaggagcagtacggcagcacgtaccgttgcgtcagcgtcctcaccgtcctgcaccaggactggctgaatggcaaggagtacaagtgcaaggtgtccaacaaagccctcccagcccccatcgagaaaaccatctccaaagccaaagggcagccccgagaaccacaggtgtacaccctgcccccatcccgggaggagatgaccaagaaccaggtcagcctgacctgcctggtcaaaggcttctatcccagcgacatcgccgtggagtgggagagcaatgggcagccggagaacaactacaagaccacgcctcccgtgctggactccgacggctccttcttcctctatagcaagctcaccgtggacaagagcaggtggcagcaggggaacgtcttctcatgctccgtgatgcatgaggctctgcacaaccactacacgcagaagagcctctccctgtctcccgggggaggcggtggatcctctccaggtcaaggtactcaatccgaaaactcctgcacccacttcccgggtaacctgccgaacatgctgcgtgacctgcgtgacgctttctcccgtgttaaaaccttcttcgagatgaaagaccagctggacaacctgctgctgaaagaatccctgctggaagacttcaaaggttacctgggttgtcaggctctgtccgaaatgatccagttctacctggaagaagttatgccgcaggctgaaaaccaggacccggacatcaaagctcacgttaactccctgggtgaaaacctgaaaaccctgcgtctgcgtctgcgccgttgccatcgattcctgccgtgcgaaaacggtggcggttctggtggtaaatccaaagctgttgaacaggttaaaaacgctttcaacaaactgcaggaaaaaggtatctacaaagctatgtccgaattcgacatcttcatcaactacatcgaagcttacatgaccatgaaaatccgtaactag

SEQ ID NO: 382 - DNA, 711 bp, synthetic construct; identical to SEQ ID NO: 368
  misc_feature 1..711: note = Synthetic
  source 1..711: mol_type = other DNA

SEQ ID NO: 383 - DNA, 1935 bp, synthetic construct
  misc_feature 1..1935: note = Synthetic
  source 1..1935: mol_type = other DNA
atggacatgagggtgcccgctcagctcctggggctcctgctgctgtggctgagaggtgcgcgctgtcaggtgcagctggtgcagtctggggctgaggtgaagaagcctggggcctcagtgaaggtgtcctgcaaggcttctggatacaccttcacccgttatgatatcaactgggtgcgacaggccactggacaagggcttgagtggatgggatggctgaaccctaatagtggtaacacaggccagacacagaagttccggggcagagtcaccatgaccagggacacctccatcaatacagcctacatggagctgagcagcctgagatctgaggacacggccgtgtattactgtgcgagaggggggtataccagtgcctggagatggtacttcgatctctggggccgtggcaccctggtcactgtctcctcagcctccaccaagggcccatcggtcttccccctggcaccctcctccaagagcacctctgggggcacagcggccctgggctgcctggtcaaggactacttccccgaaccggtgacggtgtcgtggaactcaggcgccctgaccagcggcgtgcacaccttcccggctgtcctacagtcctcaggactctactccctcagcagcgtggtgaccgtgccctccagcagcttgggcacccagacctacatctgcaacgtgaatcacaagcccagcaacaccaaggtggacaagaaagttgagcccaaatcttgtgacaaaactcacacatgcccaccgtgcccagcacctgaactcctggggggaccgtcagtcttcctcttccccccaaaacccaaggacaccctcatgatctcccggacccctgaggtcacatgcgtggtggtggacgtgagccacgaagaccctgaggtcaagttcaactggtacgtggacggcgtggaggtgcataatgccaagacaaagccgtgcgaggagcagtacggcagcacgtaccgttgcgtcagcgtcctcaccgtcctgcaccaggactggctgaatggcaaggagtacaagtgcaaggtgtccaacaaagccctcccagcccccatcgagaaaaccatctccaaagccaaagggcagccccgagaaccacaggtgtacaccctgcccccatcccgggaggagatgaccaagaaccaggtcagcctgacctgcctggtcaaaggcttctatcccagcgacatcgccgtggagtgggagagcaatgggcagccggagaacaactacaagaccacgcctcccgtgctggactccgacggctccttcttcctctatagcaagctcaccgtggacaagagcaggtggcagcaggggaacgtcttctcatgctccgtgatgcatgaggctctgcacaaccactacacgcagaagagcctctccctgtctcccgggggaggcggtggatcctctccaggtcaaggtactcaatccgaaaactcctgcacccacttcccgggtaacctgccgaacatgctgcgtgacctgcttgacgctttctcccgtgttaaaaccttcttccagatgaaagaccagctggacaacctgctgctgaaagaatccctgctggaagacttcaaaggttacctgggttgtcaggctctgtccgaaatgatccagttctacctggaagaagttatgccgcaggctgaaaaccaggacccggacatcaaagctcacgttaactccctgggtgaaaacctgaaaaccctgcgtctgcgtctgcgccgttgccatcgattcctgccgtgcgaaaacggtggcggttctggtggtaaatccaaagctgttgaacaggttaaaaacgctttcaacaaactgcaggaaaaaggtatctacaaagctatgtccgaattcgacatcttcatcaactacatcgaagcttacatgaccatgaaaatccgtaactag

SEQ ID NO: 384 - DNA, 711 bp, synthetic construct
  misc_feature 1..711: note = Synthetic
  source 1..711: mol_type = other DNA
atggacatgagggtgcccgctcagctcctggggctcctgctgctgtggctgagaggtgcgcgctgtgacatccagatgacccagtctccatcctccctgtctgcatctgtaggagacagagtcaccatcacttgccaggcgagtcaggacattaacaaccatttaaattggtatcagcagaaaccagggaaagcccctaagctcctgatctacgatgtatccaatttggaaacaggggtcccatcaagtttcagtggaagtggaagcgggacagattttactttcaccatcagcagcctgcagcctgaagatatcgcaacatatttctgtcaacagtatgataaactcccgctcacttttggcggagggaccaaggtggagatcaagcgcacggtggctgcaccatctgtcttcatcttcccgccatctgatgagcagttgaaatctggaactgcctctgttgtgtgcctgctgaataacttctatcccagagaggccaaagtacagtggaaggtggataacgccctccaatcgggtaactcccaggagagtgtcacagagcaggacagcaaggacagcacctacagcctcagcagcaccctgacgctgagcaaagcagactacgagaaacacaaagtctacgcctgcgaagtcacccatcagggcctgagctcgcccgtcacaaagagcttcaacaggggagagtgttag

SEQ ID NO: 385 - DNA, 1935 bp, synthetic construct
  misc_feature 1..1935: note = Synthetic
  source 1..1935: mol_type = other DNA
atggacatgagggtgcccgctcagctcctggggctcctgctgctgtggctgagaggtgcgcgctgtcaggtgcagctggtgcagtctggggctgaggtgaagaagcctggggcctcagtgaaggtgtcctgcaaggcttctggatacaccttcacccgttatgatatcaactgggtgcgacaggccactggacaagggcttgagtggatgggatggctgaaccctaatagtggtaacacaggccagacacagaagttccggggcagagtcaccatgaccagggacacctccatcaatacagcctacatggagctgagcagcctgagatctgaggacacggccgtgtattactgtgcgagaggggggtataccagtgcctggagatggtacttcgatctctggggccgtggcaccctggtcactgtctcctcagcctccaccaagggcccatcggtcttccccctggcaccctcctccaagagcacctctgggggcacagcggccctgggctgcctggtcaaggactacttccccgaaccggtgacggtgtcgtggaactcaggcgccctgaccagcggcgtgcacaccttcccggctgtcctacagtcctcaggactctactccctcagcagcgtggtgaccgtgccctccagcagcttgggcacccagacctacatctgcaacgtgaatcacaagcccagcaacaccaaggtggacaagaaagttgagcccaaatcttgtgacaaaactcacacatgcccaccgtgcccagcacctgaactcctggggggaccgtcagtcttcctcttccccccaaaacccaaggacaccctcatgatctcccggacccctgaggtcacatgcgtggtggtggacgtgagccacgaagaccctgaggtcaagttcaactggtacgtggacggcgtggaggtgcataatgccaagacaaagccgtgcgaggagcagtacggcagcacgtaccgttgcgtcagcgtcctcaccgtcctgcaccaggactggctgaatggcaaggagtacaagtgcaaggtgtccaacaaagccctcccagcccccatcgagaaaaccatctccaaagccaaagggcagccccgagaaccacaggtgtacaccctgcccccatcccgggaggagatgaccaagaaccaggtcagcctgacctgcctggtcaaaggcttctatcccagcgacatcgccgtggagtgggagagcaatgggcagccggagaacaactacaagaccacgcctcccgtgctggactccgacggctccttcttcctctatagcaagctcaccgtggacaagagcaggtggcagcaggggaacgtcttctcatgctccgtgatgcatgaggctctgcacaaccactacacgcagaagagcctctccctgtctcccgggggaggcggtggatcctctccaggtcaaggtactcaatccgaaaactcctgcacccacttcccgggtaacctgccgaacatgctgcgtgacctgcgtgacgctttctcccgtgttaaaaccttcttccagatgaaagaccagctggacaacctgctgctgaaagaatccctgctggaagacttcaaaggttacctgggttgtcaggctctgtccgaaatgatccagttctacctggaagaagttatgccgcaggctgaaaaccaggacccggacatcaaagctcacgttaactccctgggtgaaaacctgaaaaccctgcgtctgcgtctgcgccgttgccatcgattcctgccgtgcgaaaacggtggcggttctggtggtaaatccaaagctgttgaacaggttaaaaacgctttcaacaaactgcaggaaaaaggtatctacttagctatgtccgaattcgacatcttcatcaactacatcgaagcttacatgaccatgaaaatccgtaactag

SEQ ID NO: 386 - DNA, 711 bp, synthetic construct; identical to SEQ ID NO: 384
  misc_feature 1..711: note = Synthetic
  source 1..711: mol_type = other DNA

SEQ ID NO: 387 - DNA, 1935 bp, synthetic construct
  misc_feature 1..1935: note = Synthetic
  source 1..1935: mol_type = other DNA
atggacatgagggtgcccgctcagctcctggggctcctgctgctgtggctgagaggtgcgcgctgtcaggtgcagctggtgcagtctggggctgaggtgaagaagcctggggcctcagtgaaggtgtcctgcaaggcttctggatacaccttcacccgttatgatatcaactgggtgcgacaggccactggacaagggcttgagtggatgggatggctgaaccctaatagtggtaacacaggccagacacagaagttccggggcagagtcaccatgaccagggacacctccatcaatacagcctacatggagctgagcagcctgagatctgaggacacggccgtgtattactgtgcgagaggggggtataccagtgcctggagatggtacttcgatctctggggccgtggcaccctggtcactgtctcctcagcctccaccaagggcccatcggtcttccccctggcaccctcctccaagagcacctctgggggcacagcggccctgggctgcctggtcaaggactacttccccgaaccggtgacggtgtcgtggaactcaggcgccctgaccagcggcgtgcacaccttcccggctgtcctacagtcctcaggactctactccctcagcagcgtggtgaccgtgccctccagcagcttgggcacccagacctacatctgcaacgtgaatcacaagcccagcaacaccaaggtggacaagaaagttgagcccaaatcttgtgacaaaactcacacatgcccaccgtgcccagcacctgaactcctggggggaccgtcagtcttcctcttccccccaaaacccaaggacaccctcatgatctcccggacccctgaggtcacatgcgtggtggtggacgtgagccacgaagaccctgaggtcaagttcaactggtacgtggacggcgtggaggtgcataatgccaagacaaagccgtgcgaggagcagtacggcagcacgtaccgttgcgtcagcgtcctcaccgtcctgcaccaggactggctgaatggcaaggagtacaagtgcaaggtgtccaacaaagccctcccagcccccatcgagaaaaccatctccaaagccaaagggcagccccgagaaccacaggtgtacaccctgcccccatcccgggaggagatgaccaagaaccaggtcagcctgacctgcctggtcaaaggcttctatcccagcgacatcgccgtggagtgggagagcaatgggcagccggagaacaactacaagaccacgcctcccgtgctggactccgacggctccttcttcctctatagcaagctcaccgtggacaagagcaggtggcagcaggggaacgtcttctcatgctccgtgatgcatgaggctctgcacaaccactacacgcagaagagcctctccctgtctcccgggggaggcggtggatcctctccaggtcaaggtactcaatccgaaaactcctgcacccacttcccgggtaacctgccgaacatgctgcgtgacctgcgtgacgctttctcccgtgttaaaaccttcttccagatgaaagaccagctggacaacctgctgctgaaagaatccctgctggaagacttcaaaggttacctgggttgtcaggctctgtccgaaatgatccagttctacctggaagaagttatgccgcaggctgaaaaccaggacccggacatcaaagctcacgttaactccctgggtgaaaacctgaaaaccctgcgtctgcgtctgcgccgttgccatcgattcctgccgtgcgaaaacggtggcggttctggtggtaaatccaaagctgttgaacaggttaaaaacgctttcaacaaactgcaggaaaaaggtatctacgacgctatgtccgaattcgacatcttcatcaactacatcgaagcttacatgaccatgaaaatccgtaactag

SEQ ID NO: 388 - DNA, 711 bp, synthetic construct; identical to SEQ ID NO: 384
  misc_feature 1..711: note = Synthetic
  source 1..711: mol_type = other DNA

SEQ ID NO: 389 - DNA, 1935 bp, synthetic construct
  misc_feature 1..1935: note = Synthetic
  source 1..1935: mol_type = other DNA
atggacatgagggtgcccgctcagctcctggggctcctgctgctgtggctgagaggtgcgcgctgtcaggtgcagctggtgcagtctggggctgaggtgaagaagcctggggcctcagtgaaggtgtcctgcaaggcttctggatacaccttcacccgttatgatatcaactgggtgcgacaggccactggacaagggcttgagtggatgggatggctgaaccctaatagtggtaacacaggccagacacagaagttccggggcagagtcaccatgaccagggacacctccatcaatacagcctacatggagctgagcagcctgagatctgaggacacggccgtgtattactgtgcgagaggggggtataccagtgcctggagatggtacttcgatctctggggccgtggcaccctggtcactgtctcctcagcctccaccaagggcccatcggtcttccccctggcaccctcctccaagagcacctctgggggcacagcggccctgggctgcctggtcaaggactacttccccgaaccggtgacggtgtcgtggaactcaggcgccctgaccagcggcgtgcacaccttcccggctgtcctacagtcctcaggactctactccctcagcagcgtggtgaccgtgccctccagcagcttgggcacccagacctacatctgcaacgtgaatcacaagcccagcaacaccaaggtggacaagaaagttgagcccaaatcttgtgacaaaactcacacatgcccaccgtgcccagcacctgaactcctggggggaccgtcagtcttcctcttccccccaaaacccaaggacaccctcatgatctcccggacccctgaggtcacatgcgtggtggtggacgtgagccacgaagaccctgaggtcaagttcaactggtacgtggacggcgtggaggtgcataatgccaagacaaagccgtgcgaggagcagtacggcagcacgtaccgttgcgtcagcgtcctcaccgtcctgcaccaggactggctgaatggcaaggagtacaagtgcaaggtgtccaacaaagccctcccagcccccatcgagaaaaccatctccaaagccaaagggcagccccgagaaccacaggtgtacaccctgcccccatcccgggaggagatgaccaagaaccaggtcagcctgacctgcctggtcaaaggcttctatcccagcgacatcgccgtggagtgggagagcaatgggcagccggagaacaactacaagaccacgcctcccgtgctggactccgacggctccttcttcctctatagcaagctcaccgtggacaagagcaggtggcagcaggggaacgtcttctcatgctccgtgatgcatgaggctctgcacaaccactacacgcagaagagcctctccctgtctcccgggggaggcggtggatcctctccaggtcaaggtactcaatccgaaaactcctgcacccacttcccgggtaacctgccgaacatgctgcgtgacctgcgtgacgctttctcccgtgttaaaaccttcttccagatgaaaggccagctggacaacctgctgctgaaagaatccctgctggaagacttcaaaggttacctgggttgtcaggctctgtccgaaatgatccagttctacctggaagaagttatgccgcaggctgaaaaccaggacccggacatcaaagctcacgttaactccctgggtgaaaacctgaaaaccctgcgtctgcgtctgcgccgttgccatcgattcctgccgtgcgaaaacggtggcggttctggtggtaaatccaaagctgttgaacaggttaaaaacgctttcaacaaactgcaggaaaaaggtatctacaaagctatgtccgaattcgacatcttcatcaactacatcgaagcttacatgaccatgaaaatccgtaactag

SEQ ID NO: 390 - DNA, 711 bp, synthetic construct; identical to SEQ ID NO: 384
  misc_feature 1..711: note = Synthetic
  source 1..711: mol_type = other DNA

SEQ ID NO: 391 - DNA, 1935 bp, synthetic construct
  misc_feature 1..1935: note = Synthetic
  source 1..1935: mol_type = other DNA
atggacatgagggtgcccgctcagctcctggggctcctgctgctgtggctgagaggtgcgcgctgtcaggtgcagctggtgcagtctggggctgaggtgaagaagcctggggcctcagtgaaggtgtcctgcaaggcttctggatacaccttcacccgttatgatatcaactgggtgcgacaggccactggacaagggcttgagtggatgggatggctgaaccctaatagtggtaacacaggccagacacagaagttccggggcagagtcaccatgaccagggacacctccatcaatacagcctacatggagctgagcagcctgagatctgaggacacggccgtgtattactgtgcgagaggggggtataccagtgcctggagatggtacttcgatctctggggccgtggcaccctggtcactgtctcctcagcctccaccaagggcccatcggtcttccccctggcaccctcctccaagagcacctctgggggcacagcggccctgggctgcctggtcaaggactacttccccgaaccggtgacggtgtcgtggaactcaggcgccctgaccagcggcgtgcacaccttcccggctgtcctacagtcctcaggactctactccctcagcagcgtggtgaccgtgccctccagcagcttgggcacccagacctacatctgcaacgtgaatcacaagcccagcaacaccaaggtggacaagaaagttgagcccaaatcttgtgacaaaactcacacatgcccaccgtgcccagcacctgaactcctggggggaccgtcagtcttcctcttccccccaaaacccaaggacaccctcatgatctcccggacccctgaggtcacatgcgtggtggtggacgtgagccacgaagaccctgaggtcaagttcaactggtacgtggacggcgtggaggtgcataatgccaagacaaagccgtgcgaggagcagtacggcagcacgtaccgttgcgtcagcgtcctcaccgtcctgcaccaggactggctgaatggcaaggagtacaagtgcaaggtgtccaacaaagccctcccagcccccatcgagaaaaccatctccaaagccaaagggcagccccgagaaccacaggtgtacaccctgcccccatcccgggaggagatgaccaagaaccaggtcagcctgacctgcctggtcaaaggcttctatcccagcgacatcgccgtggagtgggagagcaatgggcagccggagaacaactacaagaccacgcctcccgtgctggactccgacggctccttcttcctctatagcaagctcaccgtggacaagagcaggtggcagcaggggaacgtcttctcatgctccgtgatgcatgaggctctgcacaaccactacacgcagaagagcctctccctgtctcccgggggaggcggtggatcctctccaggtcaaggtactcaatccgaaaactcctgcacccacttcccgggtaacctgccgaacatgctgcgtgacctgcgtgacgctttctcccgtgttaaaaccttcttccggatgaaagaccagctggacaacctgctgctgaaagaatccctgctggaagacttcaaaggttacctgggttgtcaggctctgtccgaaatgatccagttctacctggaagaagttatgccgcaggctgaaaaccaggacccggacatcaaagctcacgttaactccctgggtgaaaacctgaaaaccctgcgtctgcgtctgcgccgttgccatcgattcctgccgtgcgaaaacggtggcggttctggtggtaaatccaaagctgttgaacaggttaaaaacgctttcaacaaactgcaggaaaaaggtatctacaaagctatgtccgaattcgacatcttcatcaactacatcgaagcttacatgaccatgaaaatccgtaactag

SEQ ID NO: 392 - DNA, 711 bp, synthetic construct; identical to SEQ ID NO: 384
  misc_feature 1..711: note = Synthetic
  source 1..711: mol_type = other DNA

SEQ ID NO: 393 - DNA, 1935 bp, synthetic construct
  misc_feature 1..1935: note = Synthetic
  source 1..1935: mol_type = other DNA
atggacatgagggtgcccgctcagctcctggggctcctgctgctgtggctgagaggtgcgcgctgtcaggtgcagctggtgcagtctggggctgaggtgaagaagcctggggcctcagtgaaggtgtcctgcaaggcttctggatacaccttcacccgttatgatatcaactgggtgcgacaggccactggacaagggcttgagtggatgggatggctgaaccctaatagtggtaacacaggccagacacagaagttccggggcagagtcaccatgaccagggacacctccatcaatacagcctacatggagctgagcagcctgagatctgaggacacggccgtgtattactgtgcgagaggggggtataccagtgcctggagatggtacttcgatctctggggccgtggcaccctggtcactgtctcctcagcctccaccaagggcccatcggtcttccccctggcaccctcctccaagagcacctctgggggcacagcggccctgggctgcctggtcaaggactacttccccgaaccggtgacggtgtcgtggaactcaggcgccctgaccagcggcgtgcacaccttcccggctgtcctacagtcctcaggactctactccctcagcagcgtggtgaccgtgccctccagcagcttgggcacccagacctacatctgcaacgtgaatcacaagcccagcaacaccaaggtggacaagaaagttgagcccaaatcttgtgacaaaactcacacatgcccaccgtgcccagcacctgaactcctggggggaccgtcagtcttcctcttccccccaaaacccaaggacaccctcatgatctcccggacccctgaggtcacatgcgtggtggtggacgtgagccacgaagaccctgaggtcaagttcaactggtacgtggacggcgtggaggtgcataatgccaagacaaagccgtgcgaggagcagtacggcagcacgtaccgttgcgtcagcgtcctcaccgtcctgcaccaggactggctgaatggcaaggagtacaagtgcaaggtgtccaacaaagccctcccagcccccatcgagaaaaccatctccaaagccaaagggcagccccgagaaccacaggtgtacaccctgcccccatcccgggaggagatgaccaagaaccaggtcagcctgacctgcctggtcaaaggcttctatcccagcgacatcgccgtggagtgggagagcaatgggcagccggagaacaactacaagaccacgcctcccgtgctggactccgacggctccttcttcctctatagcaagctcaccgtggacaagagcaggtggcagcaggggaacgtcttctcatgctccgtgatgcatgaggctctgcacaaccactacacgcagaagagcctctccctgtctcccgggggaggcggtggatcctctccaggtcaaggtactcaatccgaaaactcctgcacccacttcccgggtaacctgccgaacatgctgcgtgacctgcgtgacgctttctcccgtgttaaaaccttcttccagatgaaagaccagctggacaacaagctgctgaaagaatccctgctggaagacttcaaaggttacctgggttgtcaggctctgtccgaaatgatccagttctacctggaagaagttatgccgcaggctgaaaaccaggacccggacatcaaagctcacgttaactccctgggtgaaaacctgaaaaccctgcgtctgcgtctgcgccgttgccatcgattcctgccgtgcgaaaacggtggcggttctggtggtaaatccaaagctgttgaacaggttaaaaacgctttcaacaaactgcaggaaaaaggtatctacaaagctatgtccgaattcgacatcttcatcaactacatcgaagcttacatgaccatgaaaatccgtaactag

SEQ ID NO: 394 - DNA, 711 bp, synthetic construct; identical to SEQ ID NO: 384
  misc_feature 1..711: note = Synthetic
  source 1..711: mol_type = other DNA

SEQ ID NO: 395 - DNA, 1935 bp, synthetic construct
  misc_feature 1..1935: note = Synthetic
  source 1..1935: mol_type = other DNA
atggacatgagggtgcccgctcagctcctggggctcctgctgctgtggctgagaggtgcgcgctgtcaggtgcagctggtgcagtctggggctgaggtgaagaagcctggggcctcagtgaaggtgtcctgcaaggcttctggatacaccttcacccgttatgatatcaactgggtgcgacaggccactggacaagggcttgagtggatgggatggctgaaccctaatagtggtaacacaggccagacacagaagttccggggcagagtcaccatgaccagggacacctccatcaatacagcctacatggagctgagcagcctgagatctgaggacacggccgtgtattactgtgcgagaggggggtataccagtgcctggagatggtacttcgatctctggggccgtggcaccctggtcactgtctcctcagcctccaccaagggcccatcggtcttccccctggcaccctcctccaagagcacctctgggggcacagcggccctgggctgcctggtcaaggactacttccccgaaccggtgacggtgtcgtggaactcaggcgccctgaccagcggcgtgcacaccttcccggctgtcctacagtcctcaggactctactccctcagcagcgtggtgaccgtgccctccagcagcttgggcacccagacctacatctgcaacgtgaatcacaagcccagcaacaccaaggtggacaagaaagttgagcccaaatcttgtgacaaaactcacacatgcccaccgtgcccagcacctgaactcctggggggaccgtcagtcttcctcttccccccaaaacccaaggacaccctcatgatctcccggacccctgaggtcacatgcgtggtggtggacgtgagccacgaagaccctgaggtcaagttcaactggtacgtggacggcgtggaggtgcataatgccaagacaaagccgtgcgaggagcagtacggcagcacgtaccgttgcgtcagcgtcctcaccgtcctgcaccaggactggctgaatggcaaggagtacaagtgcaaggtgtccaacaaagccctcccagcccccatcgagaaaaccatctccaaagccaaagggcagccccgagaaccacaggtgtacaccctgcccccatcccgggaggagatgaccaagaaccaggtcagcctgacctgcctggtcaaaggcttctatcccagcgacatcgccgtggagtgggagagcaatgggcagccggagaacaactacaagaccacgcctcccgtgctggactccgacggctccttcttcctctatagcaagctcaccgtggacaagagcaggtggcagcaggggaacgtcttctcatgctccgtgatgcatgaggctctgcacaaccactacacgcagaagagcctctccctgtctcccgggggaggcggtggatcctctccaggtcaaggtactcaatccgaaaactcctgcacccacttcccgggtaacctgccgaacatgctgcgtgacctgcgtgacgctttctcccgtgttgacaccttcttccagatgaaagaccagctggacaacctgctgctgaaagaatccctgctggaagacttcaaaggttacctgggttgtcaggctctgtccgaaatgatccagttctacctggaagaagttatgccgcaggctgaaaaccaggacccggacatcaaagctcacgttaactccctgggtgaaaacctgaaaaccctgcgtctgcgtctgcgccgttgccatcgattcctgccgtgcgaaaacggtggcggttctggtggtaaatccaaagctgttgaacaggttaaaaacgctttcaacaaactgcaggaaaaaggtatctacaaagctatgtccgaattcgacatcttcatcaactacatcgaagcttacatgaccatgaaaatccgtaactag

SEQ ID NO: 396 - DNA, 711 bp, synthetic construct; identical to SEQ ID NO: 384
  misc_feature 1..711: note = Synthetic
  source 1..711: mol_type = other DNA

SEQ ID NO: 397 - DNA, 1935 bp, synthetic construct
  misc_feature 1..1935: note = Synthetic
  source 1..1935: mol_type = other DNA
atggacatgagggtgcccgctcagctcctggggctcctgctgctgtggctgagaggtgcgcgctgtcaggtgcagctggtgcagtctggggctgaggtgaagaagcctggggcctcagtgaaggtgtcctgcaaggcttctggatacaccttcacccgttatgatatcaactgggtgcgacaggccactggacaagggcttgagtggatgggatggctgaaccctaatagtggtaacacaggccagacacagaagttccggggcagagtcaccatgaccagggacacctccatcaatacagcctacatggagctgagcagcctgagatctgaggacacggccgtgtattactgtgcgagaggggggtataccagtgcctggagatggtacttcgatctctggggccgtggcaccctggtcactgtctcctcagcctccaccaagggcccatcggtcttccccctggcaccctcctccaagagcacctctgggggcacagcggccctgggctgcctggtcaaggactacttccccgaaccggtgacggtgtcgtggaactcaggcgccctgaccagcggcgtgcacaccttcccggctgtcctacagtcctcaggactctactccctcagcagcgtggtgaccgtgccctccagcagcttgggcacccagacctacatctgcaacgtgaatcacaagcccagcaacaccaaggtggacaagaaagttgagcccaaatcttgtgacaaaactcacacatgcccaccgtgcccagcacctgaactcctggggggaccgtcagtcttcctcttccccccaaaacccaaggacaccctcatgatctcccggacccctgaggtcacatgcgtggtggtggacgtgagccacgaagaccctgaggtcaagttcaactggtacgtggacggcgtggaggtgcataatgccaagacaaagccgtgcgaggagcagtacggcagcacgtaccgttgcgtcagcgtcctcaccgtcctgcaccaggactggctgaatggcaaggagtacaagtgcaaggtgtccaacaaagccctcccagcccccatcgagaaaaccatctccaaagccaaagggcagccccgagaaccacaggtgtacaccctgcccccatcccgggaggagatgaccaagaaccaggtcagcctgacctgcctggtcaaaggcttctatcccagcgacatcgccgtggagtgggagagcaatgggcagccggagaacaactacaagaccacgcctcccgtgctggactccgacggctccttcttcctctatagcaagctcaccgtggacaagagcaggtggcagcaggggaacgtcttctcatgctccgtgatgcatgaggctctgcacaaccactacacgcagaagagcctctccctgtctcccgggggaggcggtggatcctctccaggtcaaggtactcaatccgaaaactcctgcacccacttcccgggtaacctgccgaacatgctgcgtgacctgcgtgacgctttctcccgtgttaaaaccttcttcgagatgaaagaccagctggacaacctgctgctgaaagaatccctgctggaagacttcaaaggttacctgggttgtcaggctctgtccgaaatgatccagttctacctggaagaagttatgccgcaggctgaaaaccaggacccggacatcaaagctcacgttaactccctgggtgaaaacctgaaaaccctgcgtctgcgtctgcgccgttgccatcgattcctgccgtgcgaaaacggtggcggttctggtggtaaatccaaagctgttgaacaggttaaaaacgctttcaacaaactgcaggaaaaaggtatctacaaagctatgtccgaattcgacatcttcatcaactacatcgaagcttacatgaccatgaaaatccgtaactag

SEQ ID NO: 398 - DNA, 711 bp, synthetic construct; identical to SEQ ID NO: 384
  misc_feature 1..711: note = Synthetic
  source 1..711: mol_type = other DNA

SEQ ID NO: 399 - DNA, 1938 bp, synthetic construct
  misc_feature 1..1938: note = Synthetic
  source 1..1938: mol_type = other DNA
atggacatgagggtgcccgctcagctcctggggctcctgctgctgtggctgagaggtgcgcgctgtcaggtgcagctggtgcagtctggggctgaggtgaagaagcctggggcctcagtgaaggtgtcctgcaaggcttctggatacaccttcaccagttatgatatcaattgggtgcgacaggccactggacaagggcttgagtggatgggatggatgaaccctaacagtggtaactcaggctctgtaaagaagttccgggacagagtcaccatgaccagggacacctccatcagcactgcctacatggaattgagcagcctgagatctgaggacacggccgtgtattactgtgtgagacttatcgggtatagcagtgcctggaagtggtccttccagcactggggccagggcaccctggtcaccgtgtcctcagcctccaccaagggcccatcggtcttccccctggcaccctcctccaagagcacctctgggggcacagcggccctgggctgcctggtcaaggactacttccccgaaccggtgacggtgtcgtggaactcaggcgccctgaccagcggcgtgcacaccttcccggctgtcctacagtcctcaggactctactccctcagcagcgtggtgaccgtgccctccagcagcttgggcacccagacctacatctgcaacgtgaatcacaagcccagcaacaccaaggtggacaagaaagttgagcccaaatcttgtgacaaaactcacacatgcccaccgtgcccagcacctgaactcctggggggaccgtcagtcttcctcttccccccaaaacccaaggacaccctcatgatctcccggacccctgaggtcacatgcgtggtggtggacgtgagccacgaagaccctgaggtcaagttcaactggtacgtggacggcgtggaggtgcataatgccaagacaaagccgtgcgaggagcagtacggcagcacgtaccgttgcgtcagcgtcctcaccgtcctgcaccaggactggctgaatggcaaggagtacaagtgcaaggtgtccaacaaagccctcccagcccccatcgagaaaaccatctccaaagccaaagggcagccccgagaaccacaggtgtacaccctgcccccatcccgggaggagatgaccaagaaccaggtcagcctgacctgcctggtcaaaggcttctatcccagcgacatcgccgtggagtgggagagcaatgggcagccggagaacaactacaagaccacgcctcccgtgctggactccgacggctccttcttcctctatagcaagctcaccgtggacaagagcaggtggcagcaggggaacgtcttctcatgctccgtgatgcatgaggctctgcacaaccactacacgcagaagagcctctccctgtctcccgggggaggcggtggatcctctccaggtcaaggtactcaatccgaaaactcctgcacccacttcccgggtaacctgccgaacatgctgcgtgacctgcttgacgctttctcccgtgttaaaaccttcttccagatgaaagaccagctggacaacctgctgctgaaagaatccctgctggaagacttcaaaggttacctgggttgtcaggctctgtccgaaatgatccagttctacctggaagaagttatgccgcaggctgaaaaccaggacccggacatcaaagctcacgttaactccctgggtgaaaacctgaaaaccctgcgtctgcgtctgcgccgttgccatcgattcctgccgtgcgaaaacggtggcggttctggtggtaaatccaaagctgttgaacaggttaaaaacgctttcaacaaactgcaggaaaaaggtatctacaaagctatgtccgaattcgacatcttcatcaactacatcgaagcttacatgaccatgaaaatccgtaactag

SEQ ID NO: 400 - DNA, 711 bp, synthetic construct
  misc_feature 1..711: note = Synthetic
  source 1..711: mol_type = other DNA
atggacatgagggtgcccgctcagctcctggggctcctgctgctgtggctgagaggtgcgcgctgtgacatccagatgacccagtctccatcctccctgtctgcatctgtaggagacagagtcaccatcacttgccaggcgagtcgggacattagcaagtatttaaattggtatcaacagaaaccagggaaagcccccaaactccagatctacgatgcatccaatttggaaacaggggtcccatcaaggttcagtggaagtggatctgggacagattttactttcaccatcagcagcctgcagcctgaagatattgcaacatattactgtcaacactatgataatatcccgatcacctttggccaggggacaagactggagattaaacgaacggtggctgcaccatctgtcttcatcttcccgccatctgatgagcagttgaaatctggaactgcctctgttgtgtgcctgctgaataacttctatcccagagaggccaaagtacagtggaaggtggataacgccctccaatcgggtaactcccaggagagtgtcacagagcaggacagcaaggacagcacctacagcctcagcagcaccctgacgctgagcaaagcagactacgagaaacacaaagtctacgcctgcgaagtcacccatcagggcctgagctcgcccgtcacaaagagcttcaacaggggagagtgttag

SEQ ID NO: 401 - DNA, 1938 bp, synthetic construct
  misc_feature 1..1938: note = Synthetic
  source 1..1938: mol_type = other DNA
atggacatgagggtgcccgctcagctcctggggctcctgctgctgtggctgagaggtgcgcgctgtcaggtgcagctggtgcagtctggggctgaggtgaagaagcctggggcctcagtgaaggtgtcctgcaaggcttctggatacaccttcaccagttatgatatcaattgggtgcgacaggccactggacaagggcttgagtggatgggatggatgaaccctaacagtggtaactcaggctctgtaaagaagttccgggacagagtcaccatgaccagggacacctccatcagcactgcctacatggaattgagcagcctgagatctgaggacacggccgtgtattactgtgtgagacttatcgggtatagcagtgcctggaagtggtccttccagcactggggccagggcaccctggtcaccgtgtcctcagcctccaccaagggcccatcggtcttccccctggcaccctcctccaagagcacctctgggggcacagcggccctgggctgcctggtcaaggactacttccccgaaccggtgacggtgtcgtggaactcaggcgccctgaccagcggcgtgcacaccttcccggctgtcctacagtcctcaggactctactccctcagcagcgtggtgaccgtgccctccagcagcttgggcacccagacctacatctgcaacgtgaatcacaagcccagcaacaccaaggtggacaagaaagttgagcccaaatcttgtgacaaaactcacacatgcccaccgtgcccagcacctgaactcctggggggaccgtcagtcttcctcttccccccaaaacccaaggacaccctcatgatctcccggacccctgaggtcacatgcgtggtggtggacgtgagccacgaagaccctgaggtcaagttcaactggtacgtggacggcgtggaggtgcataatgccaagacaaagccgtgcgaggagcagtacggcagcacgtaccgttgcgtcagcgtcctcaccgtcctgcaccaggactggctgaatggcaaggagtacaagtgcaaggtgtccaacaaagccctcccagcccccatcgagaaaaccatctccaaagccaaagggcagccccgagaaccacaggtgtacaccctgcccccatcccgggaggagatgaccaagaaccaggtcagcctgacctgcctggtcaaaggcttctatcccagcgacatcgccgtggagtgggagagcaatgggcagccggagaacaactacaagaccacgcctcccgtgctggactccgacggctccttcttcctctatagcaagctcaccgtggacaagagcaggtggcagcaggggaacgtcttctcatgctccgtgatgcatgaggctctgcacaaccactacacgcagaagagcctctccctgtctcccgggggaggcggtggatcctctccaggtcaaggtactcaatccgaaaactcctgcacccacttcccgggtaacctgccgaacatgctgcgtgacctgcgtgacgctttctcccgtgttaaaaccttcttccagatgaaagaccagctggacaacctgctgctgaaagaatccctgctggaagacttcaaaggttacctgggttgtcaggctctgtccgaaatgatccagttctacctggaagaagttatgccgcaggctgaaaaccaggacccggacatcaaagctcacgttaactccctgggtgaaaacctgaaaaccctgcgtctgcgtctgcgccgttgccatcgattcctgccgtgcgaaaacggtggcggttctggtggtaaatccaaagctgttgaacaggttaaaaacgctttcaacaaactgcaggaaaaaggtatctacttagctatgtccgaattcgacatcttcatcaactacatcgaagcttacatgaccatgaaaatccgtaactag

SEQ ID NO: 402 - DNA, 711 bp, synthetic construct; identical to SEQ ID NO: 400
  misc_feature 1..711: note = Synthetic
  source 1..711: mol_type = other DNA

SEQ ID NO: 403 - DNA, 1938 bp, synthetic construct
  misc_feature 1..1938: note = Synthetic
  source 1..1938: mol_type = other DNA
atggacatgagggtgcccgctcagctcctggggctcctgctgctgtggctgagaggtgcgcgctgtcaggtgcagctggtgcagtctggggctgaggtgaagaagcctggggcctcagtgaaggtgtcctgcaaggcttctggatacaccttcaccagttatgatatcaattgggtgcgacaggccactggacaagggcttgagtggatgggatggatgaaccctaacagtggtaactcaggctctgtaaagaagttccgggacagagtcaccatgaccagggacacctccatcagcactgcctacatggaattgagcagcctgagatctgaggacacggccgtgtattactgtgtgagacttatcgggtatagcagtgcctggaagtggtccttccagcactggggccagggcaccctggtcaccgtgtcctcagcctccaccaagggcccatcggtcttccccctggcaccctcctccaagagcacctctgggggcacagcggccctgggctgcctggtcaaggactacttccccgaaccggtgacggtgtcgtggaactcaggcgccctgaccagcggcgtgcacaccttcccggctgtcctacagtcctcaggactctactccctcagcagcgtggtgaccgtgccctccagcagcttgggcacccagacctacatctgcaacgtgaatcacaagcccagcaacaccaaggtggacaagaaagttgagcccaaatcttgtgacaaaactcacacatgcccaccgtgcccagcacctgaactcctggggggaccgtcagtcttcctcttccccccaaaacccaaggacaccctcatgatctcccggacccctgaggtcacatgcgtggtggtggacgtgagccacgaagaccctgaggtcaagttcaactggtacgtggacggcgtggaggtgcataatgccaagacaaagccgtgcgaggagcagtacggcagcacgtaccgttgcgtcagcgtcctcaccgtcctgcaccaggactggctgaatggcaaggagtacaagtgcaaggtgtccaacaaagccctcccagcccccatcgagaaaaccatctccaaagccaaagggcagccccgagaaccacaggtgtacaccctgcccccatcccgggaggagatgaccaagaaccaggtcagcctgacctgcctggtcaaaggcttctatcccagcgacatcgccgtggagtgggagagcaatgggcagccggagaacaactacaagaccacgcctcccgtgctggactccgacggctccttcttcctctatagcaagctcaccgtggacaagagcaggtggcagcaggggaacgtcttctcatgctccgtgatgcatgaggctctgcacaaccactacacgcagaagagcctctccctgtctcccgggggaggcggtggatcctctccaggtcaaggtactcaatccgaaaactcctgcacccacttcccgggtaacctgccgaacatgctgcgtgacctgcgtgacgctttctcccgtgttaaaaccttcttccagatgaaagaccagctggacaacctgctgctgaaagaatccctgctggaagacttcaaaggttacctgggttgtcaggctctgtccgaaatgatccagttctacctggaagaagttatgccgcaggctgaaaaccaggacccggacatcaaagctcacgttaactccctgggtgaaaacctgaaaaccctgcgtctgcgtctgcgccgttgccatcgattcctgccgtgcgaaaacggtggcggttctggtggtaaatccaaagctgttgaacaggttaaaaacgctttcaacaaactgcaggaaaaaggtatctacgacgctatgtccgaattcgacatcttcatcaactacatcgaagcttacatgaccatgaaaatccgtaactag

SEQ ID NO: 404 - DNA, 711 bp, synthetic construct; identical to SEQ ID NO: 400
  misc_feature 1..711: note = Synthetic
  source 1..711: mol_type = other DNA

SEQ ID NO: 405 - DNA, 1938 bp, synthetic construct
  misc_feature 1..1938: note = Synthetic
  source 1..1938: mol_type = other DNA
atggacatgagggtgcccgctcagctcctggggctcctgctgctgtggctgagaggtgcgcgctgtcaggtgcagctggtgcagtctggggctgaggtgaagaagcctggggcctcagtgaaggtgtcctgcaaggcttctggatacaccttcaccagttatgatatcaattgggtgcgacaggccactggacaagggcttgagtggatgggatggatgaaccctaacagtggtaactcaggctctgtaaagaagttccgggacagagtcaccatgaccagggacacctccatcagcactgcctacatggaattgagcagcctgagatctgaggacacggccgtgtattactgtgtgagacttatcgggtatagcagtgcctggaagtggtccttccagcactggggccagggcaccctggtcaccgtgtcctcagcctccaccaagggcccatcggtcttccccctggcaccctcctccaagagcacctctgggggcacagcggccctgggctgcctggtcaaggactacttccccgaaccggtgacggtgtcgtggaactcaggcgccctgaccagcggcgtgcacaccttcccggctgtcctacagtcctcaggactctactccctcagcagcgtggtgaccgtgccctccagcagcttgggcacccagacctacatctgcaacgtgaatcacaagcccagcaacaccaaggtggacaagaaagttgagcccaaatcttgtgacaaaactcacacatgcccaccgtgcccagcacctgaactcctggggggaccgtcagtcttcctcttccccccaaaacccaaggacaccctcatgatctcccggacccctgaggtcacatgcgtggtggtggacgtgagccacgaagaccctgaggtcaagttcaactggtacgtggacggcgtggaggtgcataatgccaagacaaagccgtgcgaggagcagtacggcagcacgtaccgttgcgtcagcgtcctcaccgtcctgcaccaggactggctgaatggcaaggagtacaagtgcaaggtgtccaacaaagccctcccagcccccatcgagaaaaccatctccaaagccaaagggcagccccgagaaccacaggtgtacaccctgcccccatcccgggaggagatgaccaagaaccaggtcagcctgacctgcctggtcaaaggcttctatcccagcgacatcgccgtggagtgggagagcaatgggcagccggagaacaactacaagaccacgcctcccgtgctggactccgacggctccttcttcctctatagcaagctcaccgtggacaagagcaggtggcagcaggggaacgtcttctcatgctccgtgatgcatgaggctctgcacaaccactacacgcagaagagcctctccctgtctcccgggggaggcggtggatcctctccaggtcaaggtactcaatccgaaaactcctgcacccacttcccgggtaacctgccgaacatgctgcgtgacctgcgtgacgctttctcccgtgttaaaaccttcttccagatgaaaggccagctggacaacctgctgctgaaagaatccctgctggaagacttcaaaggttacctgggttgtcaggctctgtccgaaatgatccagttctacctggaagaagttatgccgcaggctgaaaaccaggacccggacatcaaagctcacgttaactccctgggtgaaaacctgaaaaccctgcgtctgcgtctgcgccgttgccatcgattcctgccgtgcgaaaacggtggcggttctggtggtaaatccaaagctgttgaacaggttaaaaacgctttcaacaaactgcaggaaaaaggtatctacaaagctatgtccgaattcgacatcttcatcaactacatcgaagcttacatgaccatgaaaatccgtaactag

SEQ ID NO: 406 - DNA, 711 bp, synthetic construct; identical to SEQ ID NO: 400
  misc_feature 1..711: note = Synthetic
  source 1..711: mol_type = other DNA

SEQ ID NO: 407 - DNA, 1938 bp, synthetic construct
  misc_feature 1..1938: note = Synthetic
  source 1..1938: mol_type = other DNA
atggacatgagggtgcccgctcagctcctggggctcctgctgctgtggctgagaggtgcgcgctgtcaggtgcagctggtgcagtctggggctgaggtgaagaagcctggggcctcagtgaaggtgtcctgcaaggcttctggatacaccttcaccagttatgatatcaattgggtgcgacaggccactggacaagggcttgagtggatgggatggatgaaccctaacagtggtaactcaggctctgtaaagaagttccgggacagagtcaccatgaccagggacacctccatcagcactgcctacatggaattgagcagcctgagatctgaggacacggccgtgtattactgtgtgagacttatcgggtatagcagtgcctggaagtggtccttccagcactggggccagggcaccctggtcaccgtgtcctcagcctccaccaagggcccatcggtcttccccctggcaccctcctccaagagcacctctgggggcacagcggccctgggctgcctggtcaaggactacttccccgaaccggtgacggtgtcgtggaactcaggcgccctgaccagcggcgtgcacaccttcccggctgtcctacagtcctcaggactctactccctcagcagcgtggtgaccgtgccctccagcagcttgggcacccagacctacatctgcaacgtgaatcacaagcccagcaacaccaaggtggacaagaaagttgagcccaaatcttgtgacaaaactcacacatgcccaccgtgcccagcacctgaactcctggggggaccgtcagtcttcctcttccccccaaaacccaaggacaccctcatgatctcccggacccctgaggtcacatgcgtggtggtggacgtgagccacgaagaccctgaggtcaagttcaactggtacgtggacggcgtggaggtgcataatgccaagacaaagccgtgcgaggagcagtacggcagcacgtaccgttgcgtcagcgtcctcaccgtcctgcaccaggactggctgaatggcaaggagtacaagtgcaaggtgtccaacaaagccctcccagcccccatcgagaaaaccatctccaaagccaaagggcagccccgagaaccacaggtgtacaccctgcccccatcccgggaggagatgaccaagaaccaggtcagcctgacctgcctggtcaaaggcttctatcccagcgacatcgccgtggagtgggagagcaatgggcagccggagaacaactacaagaccacgcctcccgtgctggactccgacggctccttcttcctctatagcaagctcaccgtggacaagagcaggtggcagcaggggaacgtcttctcatgctccgtgatgcatgaggctctgcacaaccactacacgcagaagagcctctccctgtctcccgggggaggcggtggatcctctccaggtcaaggtactcaatccgaaaactcctgcacccacttcccgggtaacctgccgaacatgctgcgtgacctgcgtgacgctttctcccgtgttaaaaccttcttccggatgaaagaccagctggacaacctgctgctgaaagaatccctgctggaagacttcaaaggttacctgggttgtcaggctctgtccgaaatgatccagttctacctggaagaagttatgccgcaggctgaaaaccaggacccggacatcaaagctcacgttaactccctgggtgaaaacctgaaaaccctgcgtctgcgtctgcgccgttgccatcgattcctgccgtgcgaaaacggtggcggttctggtggtaaatccaaagctgttgaacaggttaaaaacgctttcaacaaactgcaggaaaaaggtatctacaaagctatgtccgaattcgacatcttcatcaactacatcgaagcttacatgaccatgaaaatccgtaactag

SEQ ID NO: 408 - DNA, 711 bp, synthetic construct; identical to SEQ ID NO: 400
  misc_feature 1..711: note = Synthetic
  source 1..711: mol_type = other DNA

SEQ ID NO: 409 - DNA, 1938 bp, synthetic construct
  misc_feature 1..1938: note = Synthetic
  source 1..1938: mol_type = other DNA
atggacatgagggtgcccgctcagctcctggggctcctgctgctgtggctgagaggtgcgcgctgtcaggtgcagctggtgcagtctggggctgaggtgaagaagcctggggcctcagtgaaggtgtcctgcaaggcttctggatacaccttcaccagttatgatatcaattgggtgcgacaggccactggacaagggcttgagtggatgggatggatgaaccctaacagtggtaactcaggctctgtaaagaagttccgggacagagtcaccatgaccagggacacctccatcagcactgcctacatggaattgagcagcctgagatctgaggacacggccgtgtattactgtgtgagacttatcgggtatagcagtgcctggaagtggtccttccagcactggggccagggcaccctggtcaccgtgtcctcagcctccaccaagggcccatcggtcttccccctggcaccctcctccaagagcacctctgggggcacagcggccctgggctgcctggtcaaggactacttccccgaaccggtgacggtgtcgtggaactcaggcgccctgaccagcggcgtgcacaccttcccggctgtcctacagtcctcaggactctactccctcagcagcgtggtgaccgtgccctccagcagcttgggcacccagacctacatctgcaacgtgaatcacaagcccagcaacaccaaggtggacaagaaagttgagcccaaatcttgtgacaaaactcacacatgcccaccgtgcccagcacctgaactcctggggggaccgtcagtcttcctcttccccccaaaacccaaggacaccctcatgatctcccggacccctgaggtcacatgcgtggtggtggacgtgagccacgaagaccctgaggtcaagttcaactggtacgtggacggcgtggaggtgcataatgccaagacaaagccgtgcgaggagcagtacggcagcacgtaccgttgcgtcagcgtcctcaccgtcctgcaccaggactggctgaatggcaaggagtacaagtgcaaggtgtccaacaaagccctcccagcccccatcgagaaaaccatctccaaagccaaagggcagccccgagaaccacaggtgtacaccctgcccccatcccgggaggagatgaccaagaaccaggtcagcctgacctgcctggtcaaaggcttctatcccagcgacatcgccgtggagtgggagagcaatgggcagccggagaacaactacaagaccacgcctcccgtgctggactccgacggctccttcttcctctatagcaagctcaccgtggacaagagcaggtggcagcaggggaacgtcttctcatgctccgtgatgcatgaggctctgcacaaccactacacgcagaagagcctctccctgtctcccgggggaggcggtggatcctctccaggtcaaggtactcaatccgaaaactcctgcacccacttcccgggtaacctgccgaacatgctgcgtgacctgcgtgacgctttctcccgtgttaaaaccttcttccagatgaaagaccagctggacaacaagctgctgaaagaatccctgctggaagacttcaaaggttacctgggttgtcaggctctgtccgaaatgatccagttctacctggaagaagttatgccgcaggctgaaaaccaggacccggacatcaaagctcacgttaactccctgggtgaaaacctgaaaaccctgcgtctgcgtctgcgccgttgccatcgattcctgccgtgcgaaaacggtggcggttctggtggtaaatccaaagctgttgaacaggttaaaaacgctttcaacaaactgcaggaaaaaggtatctacaaagctatgtccgaattcgacatcttcatcaactacatcgaagcttacatgaccatgaaaatccgtaactag

SEQ ID NO: 410 - DNA, 711 bp, synthetic construct; identical to SEQ ID NO: 400
  misc_feature 1..711: note = Synthetic
  source 1..711: mol_type = other DNA

SEQ ID NO: 411 - DNA, 1938 bp, synthetic construct
  misc_feature 1..1938: note = Synthetic
  source 1..1938: mol_type = other DNA
atggacatgagggtgcccgctcagctcctggggctcctgctgctgtggctgagaggtgcgcgctgtcaggtgcagctggtgcagtctggggctgaggtgaagaagcctggggcctcagtgaaggtgtcctgcaaggcttctggatacaccttcaccagttatgatatcaattgggtgcgacaggccactggacaagggcttgagtggatgggatggatgaaccctaacagtggtaactcaggctctgtaaagaagttccgggacagagtcaccatgaccagggacacctccatcagcactgcctacatggaattgagcagcctgagatctgaggacacggccgtgtattactgtgtgagacttatcgggtatagcagtgcctggaagtggtccttccagcactggggccagggcaccctggtcaccgtgtcctcagcctccaccaagggcccatcggtcttccccctggcaccctcctccaagagcacctctgggggcacagcggccctgggctgcctggtcaaggactacttccccgaaccggtgacggtgtcgtggaactcaggcgccctgaccagcggcgtgcacaccttcccggctgtcctacagtcctcaggactctactccctcagcagcgtggtgaccgtgccctccagcagcttgggcacccagacctacatctgcaacgtgaatcacaagcccagcaacaccaaggtggacaagaaagttgagcccaaatcttgtgacaaaactcacacatgcccaccgtgcccagcacctgaactcctggggggaccgtcagtcttcctcttccccccaaaacccaaggacaccctcatgatctcccggacccctgaggtcacatgcgtggtggtggacgtgagccacgaagaccctgaggtcaagttcaactggtacgtggacggcgtggaggtgcataatgccaagacaaagccgtgcgaggagcagtacggcagcacgtaccgttgcgtcagcgtcctcaccgtcctgcaccaggactggctgaatggcaaggagtacaagtgcaaggtgtccaacaaagccctcccagcccccatcgagaaaaccatctccaaagccaaagggcagccccgagaaccacaggtgtacaccctgcccccatcccgggaggagatgaccaagaaccaggtcagcctgacctgcctggtcaaaggcttctatcccagcgacatcgccgtggagtgggagagcaatgggcagccggagaacaactacaagaccacgcctcccgtgctggactccgacggctccttcttcctctatagcaagctcaccgtggacaagagcaggtggcagcaggggaacgtcttctcatgctccgtgatgcatgaggctctgcacaaccactacacgcagaagagcctctccctgtctcccgggggaggcggtggatcctctccaggtcaaggtactcaatccgaaaactcctgcacccacttcccgggtaacctgccgaacatgctgcgtgacctgcgtgacgctttctcccgtgttgacaccttcttccagatgaaagaccagctggacaacctgctgctgaaagaatccctgctggaagacttcaaaggttacctgggttgtcaggctctgtccgaaatgatccagttctacctggaagaagttatgccgcaggctgaaaaccaggacccggacatcaaagctcacgttaactccctgggtgaaaacctgaaaaccctgcgtctgcgtctgcgccgttgccatcgattcctgccgtgcgaaaacggtggcggttctggtggtaaatccaaagctgttgaacaggttaaaaacgctttcaacaaactgcaggaaaaaggtatctacaaagctatgtccgaattcgacatcttcatcaactacatcgaagcttacatgaccatgaaaatccgtaactag

SEQ ID NO: 412 - DNA, 711 bp, synthetic construct; identical to SEQ ID NO: 400
  misc_feature 1..711: note = Synthetic
  source 1..711: mol_type = other DNA

SEQ ID NO: 413 - DNA, 1938 bp, synthetic construct
  misc_feature 1..1938: note = Synthetic
  source 1..1938: mol_type = other DNA
atggacatgagggtgcccgctcagctcctggggctcctgctgctgtggctgagaggtgcgcgctgtcaggtgcagctggtgcagtctggggctgaggtgaagaagcctggggcctcagtgaaggtgtcctgcaaggcttctggatacaccttcaccagttatgatatcaattgggtgcgacaggccactggacaagggcttgagtggatgggatggatgaaccctaacagtggtaactcaggctctgtaaagaagttccgggacagagtcaccatgaccagggacacctccatcagcactgcctacatggaattgagcagcctgagatctgaggacacggccgtgtattactgtgtgagacttatcgggtatagcagtgcctggaagtggtccttccagcactggggccagggcaccctggtcaccgtgtcctcagcctccaccaagggcccatcggtcttccccctggcaccctcctccaagagcacctctgggggcacagcggccctgggctgcctggtcaaggactacttccccgaaccggtgacggtgtcgtggaactcaggcgccctgaccagcggcgtgcacaccttcccggctgtcctacagtcctcaggactctactccctcagcagcgtggtgaccgtgccctccagcagcttgggcacccagacctacatctgcaacgtgaatcacaagcccagcaacaccaaggtggacaagaaagttgagcccaaatcttgtgacaaaactcacacatgcccaccgtgcccagcacctgaactcctggggggaccgtcagtcttcctcttccccccaaaacccaaggacaccctcatgatctcccggacccctgaggtcacatgcgtggtggtggacgtgagccacgaagaccctgaggtcaagttcaactggtacgtggacggcgtggaggtgcataatgccaagacaaagccgtgcgaggagcagtacggcagcacgtaccgttgcgtcagcgtcctcaccgtcctgcaccaggactggctgaatggcaaggagtacaagtgcaaggtgtccaacaaagccctcccagcccccatcgagaaaaccatctccaaagccaaagggcagccccgagaaccacaggtgtacaccctgcccccatcccgggaggagatgaccaagaaccaggtcagcctgacctgcctggtcaaaggcttctatcccagcgacatcgccgtggagtgggagagcaatgggcagccggagaacaactacaagaccacgcctcccgtgctggactccgacggctccttcttcctctatagcaagctcaccgtggacaagagcaggtggcagcaggggaacgtcttctcatgctccgtgatgcatgaggctctgcacaaccactacacgcagaagagcctctccctgtctcccgggggaggcggtggatcctctccaggtcaaggtactcaatccgaaaactcctgcacccacttcccgggtaacctgccgaacatgctgcgtgacctgcgtgacgctttctcccgtgttaaaaccttcttcgagatgaaagaccagctggacaacctgctgctgaaagaatccctgctggaagacttcaaaggttacctgggttgtcaggctctgtccgaaatgatccagttctacctggaagaagttatgccgcaggctgaaaaccaggacccggacatcaaagctcacgttaactccctgggtgaaaacctgaaaaccctgcgtctgcgtctgcgccgttgccatcgattcctgccgtgcgaaaacggtggcggttctggtggtaaatccaaagctgttgaacaggttaaaaacgctttcaacaaactgcaggaaaaaggtatctacaaagctatgtccgaattcgacatcttcatcaactacatcgaagcttacatgaccatgaaaatccgtaactag

SEQ ID NO: 414 - DNA, 711 bp, synthetic construct; identical to SEQ ID NO: 400
  misc_feature 1..711: note = Synthetic
  source 1..711: mol_type = other DNA

SEQ ID NO: 415 - DNA, 1935 bp, synthetic construct
  misc_feature 1..1935: note = Synthetic
  source 1..1935: mol_type = other DNA
atggacatgagggtgcccgctcagctcctggggctcctgctgctgtggctgagaggtgcgcgctgtcaggtgcagctggtgcagtctggggctgaggtgaagaagcctggggcctcagtgaaggtgtcctgcaaggcttctggatacaccttcaccagttatgatatcaactgggtgcgacaggccactggacaagggcttgagtggatgggaaggatgaaccctaagagtggtaatgcaggctatgtacagaacttccggggcagagtcaccatgaccagggacacctccatcagcacagcctacatggagctgagcagcctgagatctgaggacacggccgtgtattactgtgcgagaggcgggcgtaccagcatctggtccttcgtctttgattactggggccagggcaccctggtcaccgtgtcctcagcctccaccaagggcccatcggtcttccccctggcaccctcctccaagagcacctctgggggcacagcggccctgggctgcctggtcaaggactacttccccgaaccggtgacggtgtcgtggaactcaggcgccctgaccagcggcgtgcacaccttcccggctgtcctacagtcctcaggactctactccctcagcagcgtggtgaccgtgccctccagcagcttgggcacccagacctacatctgcaacgtgaatcacaagcccagcaacaccaaggtggacaagaaagttgagcccaaatcttgtgacaaaactcacacatgcccaccgtgcccagcacctgaactcctggggggaccgtcagtcttcctcttccccccaaaacccaaggacaccctcatgatctcccggacccctgaggtcacatgcgtggtggtggacgtgagccacgaagaccctgaggtcaagttcaactggtacgtggacggcgtggaggtgcataatgccaagacaaagccgtgcgaggagcagtacggcagcacgtaccgttgcgtcagcgtcctcaccgtcctgcaccaggactggctgaatggcaaggagtacaagtgcaaggtgtccaacaaagccctcccagcccccatcgagaaaaccatctccaaagccaaagggcagccccgagaaccacaggtgtacaccctgcccccatcccgggaggagatgaccaagaaccaggtcagcctgacctgcctggtcaaaggcttctatcccagcgacatcgccgtggagtgggagagcaatgggcagccggagaacaactacaagaccacgcctcccgtgctggactccgacggctccttcttcctctatagcaagctcaccgtggacaagagcaggtggcagcaggggaacgtcttctcatgctccgtgatgcatgaggctctgcacaaccactacacgcagaagagcctctccctgtctcccgggggaggcggtggatcctctccaggtcaaggtactcaatccgaaaactcctgcacccacttcccgggtaacctgccgaacatgctgcgtgacctgcttgacgctttctcccgtgttaaaaccttcttccagatgaaagaccagctggacaacctgctgctgaaagaatccctgctggaagacttcaaaggttacctgggttgtcaggctctgtccgaaatgatccagttctacctggaagaagttatgccgcaggctgaaaaccaggacccggacatcaaagctcacgttaactccctgggtgaaaacctgaaaaccctgcgtctgcgtctgcgccgttgccatcgattcctgccgtgcgaaaacggtggcggttctggtggtaaatccaaagctgttgaacaggttaaaaacgctttcaacaaactgcaggaaaaaggtatctacaaagctatgtccgaattcgacatcttcatcaactacatcgaagcttacatgaccatgaaaatccgtaactag

SEQ ID NO: 416 - DNA, 711 bp, synthetic construct
  misc_feature 1..711: note = Synthetic
  source 1..711: mol_type = other DNA
atggacatgagggtgcccgctcagctcctggggctcctgctgctgtggctgagaggtgcgcgctgtgacatccagatgacccagtctccatcctccctgtctgcatctgtaggagacagagtcaccatcacttgccaggcgagtcaggacattagcaaacatttaaattggtatcagcagaaaccagggaaagcccctaagctcctgatctacgatacctccaatttggaaacaggggtcccatcaaggttcagtggaagtggatctgggacagattttactttcaccatcagcagcctgcagcctgaagatattgcaacatataactgtcaacagtatgataagctcccgctcactttcggcggagggaccaaggtggagatcaagcgaacggtggctgcaccatctgtcttcatcttcccgccatctgatgagcagttgaaatctggaactgcctctgttgtgtgcctgctgaataacttctatcccagagaggccaaagtacagtggaaggtggataacgccctccaatcgggtaactcccaggagagtgtcacagagcaggacagcaaggacagcacctacagcctcagcagcaccctgacgctgagcaaagcagactacgagaaacacaaagtctacgcctgcgaagtcacccatcagggcctgagctcgcccgtcacaaagagcttcaacaggggagagtgttag

SEQ ID NO: 417 - DNA, 1935 bp, synthetic construct
  misc_feature 1..1935: note = Synthetic
  source 1..1935: mol_type = other DNA
atggacatgagggtgcccgctcagctcctggggctcctgctgctgtggctgagaggtgcgcgctgtcaggtgcagctggtgcagtctggggctgaggtgaagaagcctggggcctcagtgaaggtgtcctgcaaggcttctggatacaccttcaccagttatgatatcaactgggtgcgacaggccactggacaagggcttgagtggatgggaaggatgaaccctaagagtggtaatgcaggctatgtacagaacttccggggcagagtcaccatgaccagggacacctccatcagcacagcctacatggagctgagcagcctgagatctgaggacacggccgtgtattactgtgcgagaggcgggcgtaccagcatctggtccttcgtctttgattactggggccagggcaccctggtcaccgtgtcctcagcctccaccaagggcccatcggtcttccccctggcaccctcctccaagagcacctctgggggcacagcggccctgggctgcctggtcaaggactacttccccgaaccggtgacggtgtcgtggaactcaggcgccctgaccagcggcgtgcacaccttcccggctgtcctacagtcctcaggactctactccctcagcagcgtggtgaccgtgccctccagcagcttgggcacccagacctacatctgcaacgtgaatcacaagcccagcaacaccaaggtggacaagaaagttgagcccaaatcttgtgacaaaactcacacatgcccaccgtgcccagcacctgaactcctggggggaccgtcagtcttcctcttccccccaaaacccaaggacaccctcatgatctcccggacccctgaggtcacatgcgtggtggtggacgtgagccacgaagaccctgaggtcaagttcaactggtacgtggacggcgtggaggtgcataatgccaagacaaagccgtgcgaggagcagtacggcagcacgtaccgttgcgtcagcgtcctcaccgtcctgcaccaggactggctgaatggcaaggagtacaagtgcaaggtgtccaacaaagccctcccagcccccatcgagaaaaccatctccaaagccaaagggcagccccgagaaccacaggtgtacaccctgcccccatcccgggaggagatgaccaagaaccaggtcagcctgacctgcctggtcaaaggcttctatcccagcgacatcgccgtggagtgggagagcaatgggcagccggagaacaactacaagaccacgcctcccgtgctggactccgacggctccttcttcctctatagcaagctcaccgtggacaagagcaggtggcagcaggggaacgtcttctcatgctccgtgatgcatgaggctctgcacaaccactacacgcagaagagcctctccctgtctcccgggggaggcggtggatcctctccaggtcaaggtactcaatccgaaaactcctgcacccacttcccgggtaacctgccgaacatgctgcgtgacctgcgtgacgctttctcccgtgttaaaaccttcttccagatgaaagaccagctggacaacctgctgctgaaagaatccctgctggaagacttcaaaggttacctgggttgtcaggctctgtccgaaatgatccagttctacctggaagaagttatgccgcaggctgaaaaccaggacccggacatcaaagctcacgttaactccctgggtgaaaacctgaaaaccctgcgtctgcgtctgcgccgttgccatcgattcctgccgtgcgaaaacggtggcggttctggtggtaaatccaaagctgttgaacaggttaaaaacgctttcaacaaactgcaggaaaaaggtatctacttagctatgtccgaattcgacatcttcatcaactacatcgaagcttacatgaccatgaaaatccgtaactag

SEQ ID NO: 418 - DNA, 711 bp, synthetic construct; identical to SEQ ID NO: 416
  misc_feature 1..711: note = Synthetic
  source 1..711: mol_type = other DNA

SEQ ID NO: 419 - DNA, 1935 bp, synthetic construct
  misc_feature 1..1935: note = Synthetic
  source 1..1935: mol_type = other DNA
atggacatgagggtgcccgctcagctcctggggctcctgctgctgtggctgagaggtgcgcgctgtcaggtgcagctggtgcagtctggggctgaggtgaagaagcctggggcctcagtgaaggtgtcctgcaaggcttctggatacaccttcaccagttatgatatcaactgggtgcgacaggccactggacaagggcttgagtggatgggaaggatgaaccctaagagtggtaatgcaggctatgtacagaacttccggggcagagtcaccatgaccagggacacctccatcagcacagcctacatggagctgagcagcctgagatctgaggacacggccgtgtattactgtgcgagaggcgggcgtaccagcatctggtccttcgtctttgattactggggccagggcaccctggtcaccgtgtcctcagcctccaccaagggcccatcggtcttccccctggcaccctcctccaagagcacctctgggggcacagcggccctgggctgcctggtcaaggactacttccccgaaccggtgacggtgtcgtggaactcaggcgccctgaccagcggcgtgcacaccttcccggctgtcctacagtcctcaggactctactccctcagcagcgtggtgaccgtgccctccagcagcttgggcacccagacctacatctgcaacgtgaatcacaagcccagcaacaccaaggtggacaagaaagttgagcccaaatcttgtgacaaaactcacacatgcccaccgtgcccagcacctgaactcctggggggaccgtcagtcttcctcttccccccaaaacccaaggacaccctcatgatctcccggacccctgaggtcacatgcgtggtggtggacgtgagccacgaagaccctgaggtcaagttcaactggtacgtggacggcgtggaggtgcataatgccaagacaaagccgtgcgaggagcagtacggcagcacgtaccgttgcgtcagcgtcctcaccgtcctgcaccaggactggctgaatggcaaggagtacaagtgcaaggtgtccaacaaagccctcccagcccccatcgagaaaaccatctccaaagccaaagggcagccccgagaaccacaggtgtacaccctgcccccatcccgggaggagatgaccaagaaccaggtcagcctgacctgcctggtcaaaggcttctatcccagcgacatcgccgtggagtgggagagcaatgggcagccggagaacaactacaagaccacgcctcccgtgctggactccgacggctccttcttcctctatagcaagctcaccgtggacaagagcaggtggcagcaggggaacgtcttctcatgctccgtgatgcatgaggctctgcacaaccactacacgcagaagagcctctccctgtctcccgggggaggcggtggatcctctccaggtcaaggtactcaatccgaaaactcctgcacccacttcccgggtaacctgccgaacatgctgcgtgacctgcgtgacgctttctcccgtgttaaaaccttcttccagatgaaagaccagctggacaacctgctgctgaaagaatccctgctggaagacttcaaaggttacctgggttgtcaggctctgtccgaaatgatccagttctacctggaagaagttatgccgcaggctgaaaaccaggacccggacatcaaagctcacgttaactccctgggtgaaaacctgaaaaccctgcgtctgcgtctgcgccgttgccatcgattcctgccgtgcgaaaacggtggcggttctggtggtaaatccaaagctgttgaacaggttaaaaacgctttcaacaaactgcaggaaaaaggtatctacgacgctatgtccgaattcgacatcttcatcaactacatcgaagcttacatgaccatgaaaatccgtaactag

SEQ ID NO: 420 - DNA, 711 bp, synthetic construct; identical to SEQ ID NO: 416
  misc_feature 1..711: note = Synthetic
  source 1..711: mol_type = other DNA

SEQ ID NO: 421 - DNA, 1935 bp, synthetic construct
  misc_feature 1..1935: note = Synthetic
  source 1..1935: mol_type = other DNA
atggacatgagggtgcccgctcagctcctggggctcctgctgctgtggctgagaggtgcgcgctgtcaggtgcagctggtgcagtctggggctgaggtgaagaagcctggggcctcagtgaaggtgtcctgcaaggcttctggatacaccttcaccagttatgatatcaactgggtgcgacaggccactggacaagggcttgagtggatgggaaggatgaaccctaagagtggtaatgcaggctatgtacagaacttccggggcagagtcaccatgaccagggacacctccatcagcacagcctacatggagctgagcagcctgagatctgaggacacggccgtgtattactgtgcgagaggcgggcgtaccagcatctggtccttcgtctttgattactggggccagggcaccctggtcaccgtgtcctcagcctccaccaagggcccatcggtcttccccctggcaccctcctccaagagcacctctgggggcacagcggccctgggctgcctggtcaaggactacttccccgaaccggtgacggtgtcgtggaactcaggcgccctgaccagcggcgtgcacaccttcccggctgtcctacagtcctcaggactctactccctcagcagcgtggtgaccgtgccctccagcagcttgggcacccagacctacatctgcaacgtgaatcacaagcccagcaacaccaaggtggacaagaaagttgagcccaaatcttgtgacaaaactcacacatgcccaccgtgcccagcacctgaactcctggggggaccgtcagtcttcctcttccccccaaaacccaaggacaccctcatgatctcccggacccctgaggtcacatgcgtggtggtggacgtgagccacgaagaccctgaggtcaagttcaactggtacgtggacggcgtggaggtgcataatgccaagacaaagccgtgcgaggagcagtacggcagcacgtaccgttgcgtcagcgtcctcaccgtcctgcaccaggactggctgaatggcaaggagtacaagtgcaaggtgtccaacaaagccctcccagcccccatcgagaaaaccatctccaaagccaaagggcagccccgagaaccacaggtgtacaccctgcccccatcccgggaggagatgaccaagaaccaggtcagcctgacctgcctggtcaaaggcttctatcccagcgacatcgccgtggagtgggagagcaatgggcagccggagaacaactacaagaccacgcctcccgtgctggactccgacggctccttcttcctctatagcaagctcaccgtggacaagagcaggtggcagcaggggaacgtcttctcatgctccgtgatgcatgaggctctgcacaaccactacacgcagaagagcctctccctgtctcccgggggaggcggtggatcctctccaggtcaaggtactcaatccgaaaactcctgcacccacttcccgggtaacctgccgaacatgctgcgtgacctgcgtgacgctttctcccgtgttaaaaccttcttccagatgaaaggccagctggacaacctgctgctgaaagaatccctgctggaagacttcaaaggttacctgggttgtcaggctctgtccgaaatgatccagttctacctggaagaagttatgccgcaggctgaaaaccaggacccggacatcaaagctcacgttaactccctgggtgaaaacctgaaaaccctgcgtctgcgtctgcgccgttgccatcgattcctgccgtgcgaaaacggtggcggttctggtggtaaatccaaagctgttgaacaggttaaaaacgctttcaacaaactgcaggaaaaaggtatctacaaagctatgtccgaattcgacatcttcatcaactacatcgaagcttacatgaccatgaaaatccgtaactag

SEQ ID NO: 422 - DNA, 711 bp, synthetic construct; identical to SEQ ID NO: 416
  misc_feature 1..711: note = Synthetic
  source 1..711: mol_type = other DNA

SEQ ID NO: 423 - DNA, 1935 bp, synthetic construct
  misc_feature 1..1935: note = Synthetic
  source 1..1935: mol_type = other DNA
atggacatgagggtgcccgctcagctcctggggctcctgctgctgtggctgagaggtgcgcgctgtcaggtgcagctggtgcagtctggggctgaggtgaagaagcctggggcctcagtgaaggtgtcctgcaaggcttctggatacaccttcaccagttatgatatcaactgggtgcgacaggccactggacaagggcttgagtggatgggaaggatgaaccctaagagtggtaatgcaggctatgtacagaacttccggggcagagtcaccatgaccagggacacctccatcagcacagcctacatggagctgagcagcctgagatctgaggacacggccgtgtattactgtgcgagaggcgggcgtaccagcatctggtccttcgtctttgattactggggccagggcaccctggtcaccgtgtcctcagcctccaccaagggcccatcggtcttccccctggcaccctcctccaagagcacctctgggggcacagcggccctgggctgcctggtcaaggactacttccccgaaccggtgacggtgtcgtggaactcaggcgccctgaccagcggcgtgcacaccttcccggctgtcctacagtcctcaggactctactccctcagcagcgtggtgaccgtgccctccagcagcttgggcacccagacctacatctgcaacgtgaatcacaagcccagcaacaccaaggtggacaagaaagttgagcccaaatcttgtgacaaaactcacacatgcccaccgtgcccagcacctgaactcctggggggaccgtcagtcttcctcttccccccaaaacccaaggacaccctcatgatctcccggacccctgaggtcacatgcgtggtggtggacgtgagccacgaagaccctgaggtcaagttcaactggtacgtggacggcgtggaggtgcataatgccaagacaaagccgtgcgaggagcagtacggcagcacgtaccgttgcgtcagcgtcctcaccgtcctgcaccaggactggctgaatggcaaggagtacaagtgcaaggtgtccaacaaagccctcccagcccccatcgagaaaaccatctccaaagccaaagggcagccccgagaaccacaggtgtacaccctgcccccatcccgggaggagatgaccaagaaccaggtcagcctgacctgcctggtcaaaggcttctatcccagcgacatcgccgtggagtgggagagcaatgggcagccggagaacaactacaagaccacgcctcccgtgctggactccgacggctccttcttcctctatagcaagctcaccgtggacaagagcaggtggcagcaggggaacgtcttctcatgctccgtgatgcatgaggctctgcacaaccactacacgcagaagagcctctccctgtctcccgggggaggcggtggatcctctccaggtcaaggtactcaatccgaaaactcctgcacccacttcccgggtaacctgccgaacatgctgcgtgacctgcgtgacgctttctcccgtgttaaaaccttcttccggatgaaagaccagctggacaacctgctgctgaaagaatccctgctggaagacttcaaaggttacctgggttgtcaggctctgtccgaaatgatccagttctacctggaagaagttatgccgcaggctgaaaaccaggacccggacatcaaagctcacgttaactccctgggtgaaaacctgaaaaccctgcgtctgcgtctgcgccgttgccatcgattcctgccgtgcgaaaacggtggcggttctggtggtaaatccaaagctgttgaacaggttaaaaacgctttcaacaaactgcaggaaaaaggtatctacaaagctatgtccgaattcgacatcttcatcaactacatcgaagcttacatgaccatgaaaatccgtaactag

SEQ ID NO: 424 - DNA, 711 bp, synthetic construct; identical to SEQ ID NO: 416
  misc_feature 1..711: note = Synthetic
  source 1..711: mol_type = other DNA

SEQ ID NO: 425 - DNA, 1935 bp, synthetic construct
  misc_feature 1..1935: note = Synthetic
  source 1..1935: mol_type = other DNA
atggacatgagggtgcccgctcagctcctggggctcctgctgctgtggctgagaggtgcgcgctgtcaggtgcagctggtgcagtctggggctgaggtgaagaagcctggggcctcagtgaaggtgtcctgcaaggcttctggatacaccttcaccagttatgatatcaactgggtgcgacaggccactggacaagggcttgagtggatgggaaggatgaaccctaagagtggtaatgcaggctatgtacagaacttccggggcagagtcaccatgaccagggacacctccatcagcacagcctacatggagctgagcagcctgagatctgaggacacggccgtgtattactgtgcgagaggcgggcgtaccagcatctggtccttcgtctttgattactggggccagggcaccctggtcaccgtgtcctcagcctccaccaagggcccatcggtcttccccctggcaccctcctccaagagcacctctgggggcacagcggccctgggctgcctggtcaaggactacttccccgaaccggtgacggtgtcgtggaactcaggcgccctgaccagcggcgtgcacaccttcccggctgtcctacagtcctcaggactctactccctcagcagcgtggtgaccgtgccctccagcagcttgggcacccagacctacatctgcaacgtgaatcacaagcccagcaacaccaaggtggacaagaaagttgagcccaaatcttgtgacaaaactcacacatgcccaccgtgcccagcacctgaactcctggggggaccgtcagtcttcctcttccccccaaaacccaaggacaccctcatgatctcccggacccctgaggtcacatgcgtggtggtggacgtgagccacgaagaccctgaggtcaagttcaactggtacgtggacggcgtggaggtgcataatgccaagacaaagccgtgcgaggagcagtacggcagcacgtaccgttgcgtcagcgtcctcaccgtcctgcaccaggactggctgaatggcaaggagtacaagtgcaaggtgtccaacaaagccctcccagcccccatcgagaaaaccatctccaaagccaaagggcagccccgagaaccacaggtgtacaccctgcccccatcccgggaggagatgaccaagaaccaggtcagcctgacctgcctggtcaaaggcttctatcccagcgacatcgccgtggagtgggagagcaatgggcagccggagaacaactacaagaccacgcctcccgtgctggactccgacggctccttcttcctctatagcaagctcaccgtggacaagagcaggtggcagcaggggaacgtcttctcatgctccgtgatgcatgaggctctgcacaaccactacacgcagaagagcctctccctgtctcccgggggaggcggtggatcctctccaggtcaaggtactcaatccgaaaactcctgcacccacttcccgggtaacctgccgaacatgctgcgtgacctgcgtgacgctttctcccgtgttaaaaccttcttccagatgaaagaccagctggacaacaagctgctgaaagaatccctgctggaagacttcaaaggttacctgggttgtcaggctctgtccgaaatgatccagttctacctggaagaagttatgccgcaggctgaaaaccaggacccggacatcaaagctcacgttaactccctgggtgaaaacctgaaaaccctgcgtctgcgtctgcgccgttgccatcgattcctgccgtgcgaaaacggtggcggttctggtggtaaatccaaagctgttgaacaggttaaaaacgctttcaacaaactgcaggaaaaaggtatctacaaagctatgtccgaattcgacatcttcatcaactacatcgaagcttacatgaccatgaaaatccgtaactag

SEQ ID NO: 426 - DNA, 711 bp, synthetic construct; identical to SEQ ID NO: 416
  misc_feature 1..711: note = Synthetic
  source 1..711: mol_type = other DNA

SEQ ID NO: 427 - DNA, 1935 bp, synthetic construct
  misc_feature 1..1935: note = Synthetic
  source 1..1935: mol_type = other DNA
atggacatgagggtgcccgctcagctcctggggctcctgctgctgtggctgagaggtgcgcgctgtcaggtgcagctggtgcagtctggggctgaggtgaagaagcctggggcctcagtgaaggtgtcctgcaaggcttctggatacaccttcaccagttatgatatcaactgggtgcgacaggccactggacaagggcttgagtggatgggaaggatgaaccctaagagtggtaatgcaggctatgtacagaacttccggggcagagtcaccatgaccagggacacctccatcagcacagcctacatggagctgagcagcctgagatctgaggacacggccgtgtattactgtgcgagaggcgggcgtaccagcatctggtccttcgtctttgattactggggccagggcaccctggtcaccgtgtcctcagcctccaccaagggcccatcggtcttccccctggcaccctcctccaagagcacctctgggggcacagcggccctgggctgcctggtcaaggactacttccccgaaccggtgacggtgtcgtggaactcaggcgccctgaccagcggcgtgcacaccttcccggctgtcctacagtcctcaggactctactccctcagcagcgtggtgaccgtgccctccagcagcttgggcacccagacctacatctgcaacgtgaatcacaagcccagcaacaccaaggtggacaagaaagttgagcccaaatcttgtgacaaaactcacacatgcccaccgtgcccagcacctgaactcctggggggaccgtcagtcttcctcttccccccaaaacccaaggacaccctcatgatctcccggacccctgaggtcacatgcgtggtggtggacgtgagccacgaagaccctgaggtcaagttcaactggtacgtggacggcgtggaggtgcataatgccaagacaaagccgtgcgaggagcagtacggcagcacgtaccgttgcgtcagcgtcctcaccgtcctgcaccaggactggctgaatggcaaggagtacaagtgcaaggtgtccaacaaagccctcccagcccccatcgagaaaaccatctccaaagccaaagggcagccccgagaaccacaggtgtacaccctgcccccatcccgggaggagatgaccaagaaccaggtcagcctgacctgcctggtcaaaggcttctatcccagcgacatcgccgtggagtgggagagcaatgggcagccggagaacaactacaagaccacgcctcccgtgctggactccgacggctccttcttcctctatagcaagctcaccgtggacaagagcaggtggcagcaggggaacgtcttctcatgctccgtgatgcatgaggctctgcacaaccactacacgcagaagagcctctccctgtctcccgggggaggcggtggatcctctccaggtcaaggtactcaatccgaaaactcctgcacccacttcccgggtaacctgccgaacatgctgcgtgacctgcgtgacgctttctcccgtgttgacaccttcttccagatgaaagaccagctggacaacctgctgctgaaagaatccctgctggaagacttcaaaggttacctgggttgtcaggctctgtccgaaatgatccagttctacctggaagaagttatgccgcaggctgaaaaccaggacccggacatcaaagctcacgttaactccctgggtgaaaacctgaaaaccctgcgtctgcgtctgcgccgttgccatcgattcctgccgtgcgaaaacggtggcggttctggtggtaaatccaaagctgttgaacaggttaaaaacgctttcaacaaactgcaggaaaaaggtatctacaaagctatgtccgaattcgacatcttcatcaactacatcgaagcttacatgaccatgaaaatccgtaactag

SEQ ID NO: 428 - DNA, 711 bp, synthetic construct; identical to SEQ ID NO: 416
  misc_feature 1..711: note = Synthetic
  source 1..711: mol_type = other DNA

SEQ ID NO: 429 - DNA, 1935 bp, synthetic construct
  misc_feature 1..1935: note = Synthetic
  source 1..1935: mol_type = other DNA
atggacatgagggtgcccgctcagctcctggggctcctgctgctgtggctgagaggtgcgcgctgtcaggtgcagctggtgcagtctggggctgaggtgaagaagcctggggcctcagtgaaggtgtcctgcaaggcttctggatacaccttcaccagttatgatatcaactgggtgcgacaggccactggacaagggcttgagtggatgggaaggatgaaccctaagagtggtaatgcaggctatgtacagaacttccggggcagagtcaccatgaccagggacacctccatcagcacagcctacatggagctgagcagcctgagatctgaggacacggccgtgtattactgtgcgagaggcgggcgtaccagcatctggtccttcgtctttgattactggggccagggcaccctggtcaccgtgtcctcagcctccaccaagggcccatcggtcttccccctggcaccctcctccaagagcacctctgggggcacagcggccctgggctgcctggtcaaggactacttccccgaaccggtgacggtgtcgtggaactcaggcgccctgaccagcggcgtgcacaccttcccggctgtcctacagtcctcaggactctactccctcagcagcgtggtgaccgtgccctccagcagcttgggcacccagacctacatctgcaacgtgaatcacaagcccagcaacaccaaggtggacaagaaagttgagcccaaatcttgtgacaaaactcacacatgcccaccgtgcccagcacctgaactcctggggggaccgtcagtcttcctcttccccccaaaacccaaggacaccctcatgatctcccggacccctgaggtcacatgcgtggtggtggacgtgagccacgaagaccctgaggtcaagttcaactggtacgtggacggcgtggaggtgcataatgccaagacaaagccgtgcgaggagcagtacggcagcacgtaccgttgcgtcagcgtcctcaccgtcctgcaccaggactggctgaatggcaaggagtacaagtgcaaggtgtccaacaaagccctcccagcccccatcgagaaaaccatctccaaagccaaagggcagccccgagaaccacaggtgtacaccctgcccccatcccgggaggagatgaccaagaaccaggtcagcctgacctgcctggtcaaaggcttctatcccagcgacatcgccgtggagtgggagagcaatgggcagccggagaacaactacaagaccacgcctcccgtgctggactccgacggctccttcttcctctatagcaagctcaccgtggacaagagcaggtggcagcaggggaacgtcttctcatgctccgtgatgcatgaggctctgcacaaccactacacgcagaagagcctctccctgtctcccgggggaggcggtggatcctctccaggtcaaggtactcaatccgaaaactcctgcacccacttcccgggtaacctgccgaacatgctgcgtgacctgcgtgacgctttctcccgtgttaaaaccttcttcgagatgaaagaccagctggacaacctgctgctgaaagaatccctgctggaagacttcaaaggttacctgggttgtcaggctctgtccgaaatgatccagttctacctggaagaagttatgccgcaggctgaaaaccaggacccggacatcaaagctcacgttaactccctgggtgaaaacctgaaaaccctgcgtctgcgtctgcgccgttgccatcgattcctgccgtgcgaaaacggtggcggttctggtggtaaatccaaagctgttgaacaggttaaaaacgctttcaacaaactgcaggaaaaaggtatctacaaagctatgtccgaattcgacatcttcatcaactacatcgaagcttacatgaccatgaaaatccgtaactag

SEQ ID NO: 430 - DNA, 711 bp, synthetic construct; identical to SEQ ID NO: 416
  misc_feature 1..711: note = Synthetic
  source 1..711: mol_type = other DNA

SEQ ID NO: 431 - DNA, 1941 bp, synthetic construct
  misc_feature 1..1941: note = Synthetic
  source 1..1941: mol_type = other DNA
atggacatgagggtgcccgctcagctcctggggctcctgctgctgtggctgagaggtgcgcgctgtcaggtgcagctggtgcagtctggggctgaggtgaagaagcctggggcctcagtgaaggtgtcctgcaaggcttctggatacaccttcaccagttatgatatcaactgggtgcgacaggccactggacaagggcttgagtggatgggatggatgaaccctaacaggggtaacacaggctatgtaaagaagttccagggcagagtcaccatgaccagggacacctccatcagcacagcctacatggagctgagtagtctgagatctgaggacacggccgtgtattactgtgcgagaaggagggccgtgtatcgcagcagctgggagtggtacttcgatctctggggccgtggcaccctggtcactgtctcctcagcctccaccaagggcccatcggtcttccccctggcaccctcctccaagagcacctctgggggcacagcggccctgggctgcctggtcaaggactacttccccgaaccggtgacggtgtcgtggaactcaggcgccctgaccagcggcgtgcacaccttcccggctgtcctacagtcctcaggactctactccctcagcagcgtggtgaccgtgccctccagcagcttgggcacccagacctacatctgcaacgtgaatcacaagcccagcaacaccaaggtggacaagaaagttgagcccaaatcttgtgacaaaactcacacatgcccaccgtgcccagcacctgaactcctggggggaccgtcagtcttcctcttccccccaaaacccaaggacaccctcatgatctcccggacccctgaggtcacatgcgtggtggtggacgtgagccacgaagaccctgaggtcaagttcaactggtacgtggacggcgtggaggtgcataatgccaagacaaagccgtgcgaggagcagtacggcagcacgtaccgttgcgtcagcgtcctcaccgtcctgcaccaggactggctgaatggcaaggagtacaagtgcaaggtgtccaacaaagccctcccagcccccatcgagaaaaccatctccaaagccaaagggcagccccgagaaccacaggtgtacaccctgcccccatcccgggaggagatgaccaagaaccaggtcagcctgacctgcctggtcaaaggcttctatcccagcgacatcgccgtggagtgggagagcaatgggcagccggagaacaactacaagaccacgcctcccgtgctggactccgacggctccttcttcctctatagcaagctcaccgtggacaagagcaggtggcagcaggggaacgtcttctcatgctccgtgatgcatgaggctctgcacaaccactacacgcagaagagcctctccctgtctcccgggggaggcggtggatcctctccaggtcaaggtactcaatccgaaaactcctgcacccacttcccgggtaacctgccgaacatgctgcgtgacctgcttgacgctttctcccgtgttaaaaccttcttccagatgaaagaccagctggacaacctgctgctgaaagaatccctgctggaagacttcaaaggttacctgggttgtcaggctctgtccgaaatgatccagttctacctggaagaagttatgccgcaggctgaaaaccaggacccggacatcaaagctcacgttaactccctgggtgaaaacctgaaaaccctgcgtctgcgtctgcgccgttgccatcgattcctgccgtgcgaaaacggtggcggttctggtggtaaatccaaagctgttgaacaggttaaaaacgctttcaacaaactgcaggaaaaaggtatctacaaagctatgtccgaattcgacatcttcatcaactacatcgaagcttacatgaccatgaaaatccgtaactag

SEQ ID NO: 432 - DNA, 711 bp, synthetic construct
  misc_feature 1..711: note = Synthetic
  source 1..711: mol_type = other DNA
atggacatgagggtgcccgctcagctcctggggctcctgctgctgtggctgagaggtgcgcgctgtgacacccagatgacccagtctccatcctccctgtctgcatctgaaggagacagagtcaccatcacttgccaggcgagtcaggacattttcaacgatttaaattggtatcaggagaaaccagggaaagcccctaagctcctgatctaccatgcatccaatttggaaacaggggtcccatcaaggttcagtggaagtggatctgggacagattatactttcaccatcagcagcctgcagcctgaagatattgctacatattactgtcaacaatatggaaatctcccgctcactttcggcggagggaccaaggtggagatcaaacgaacggtggctgcaccatctgtcttcatcttcccgccatctgatgagcagttgaaatctggaactgcctctgttgtgtgcctgctgaataacttctatcccagagaggccaaagtacagtggaaggtggataacgccctccaatcgggtaactcccaggagagtgtcacagagcaggacagcaaggacagcacctacagcctcagcagcaccctgacgctgagcaaagcagactacgagaaacacaaagtctacgcctgcgaagtcacccatcagggcctgagctcgcccgtcacaaagagcttcaacaggggagagtgttag

SEQ ID NO: 433 - DNA, 1941 bp, synthetic construct
  misc_feature 1..1941: note = Synthetic
  source 1..1941: mol_type = other DNA
atggacatgagggtgcccgctcagctcctggggctcctgctgctgtggctgagaggtgcgcgctgtcaggtgcagctggtgcagtctggggctgaggtgaagaagcctggggcctcagtgaaggtgtcctgcaaggcttctggatacaccttcaccagttatgatatcaactgggtgcgacaggccactggacaagggcttgagtggatgggatggatgaaccctaacaggggtaacacaggctatgtaaagaagttccagggcagagtcaccatgaccagggacacctccatcagcacagcctacatggagctgagtagtctgagatctgaggacacggccgtgtattactgtgcgagaaggagggccgtgtatcgcagcagctgggagtggtacttcgatctctggggccgtggcaccctggtcactgtctcctcagcctccaccaagggcccatcggtcttccccctggcaccctcctccaagagcacctctgggggcacagcggccctgggctgcctggtcaaggactacttccccgaaccggtgacggtgtcgtggaactcaggcgccctgaccagcggcgtgcacaccttcccggctgtcctacagtcctcaggactctactccctcagcagcgtggtgaccgtgccctccagcagcttgggcacccagacctacatctgcaacgtgaatcacaagcccagcaacaccaaggtggacaagaaagttgagcccaaatcttgtgacaaaactcacacatgcccaccgtgcccagcacctgaactcctggggggaccgtcagtcttcctcttccccccaaaacccaaggacaccctcatgatctcccggacccctgaggtcacatgcgtggtggtggacgtgagccacgaagaccctgaggtcaagttcaactggtacgtggacggcgtggaggtgcataatgccaagacaaagccgtgcgaggagcagtacggcagcacgtaccgttgcgtcagcgtcctcaccgtcctgcaccaggactggctgaatggcaaggagtacaagtgcaaggtgtccaacaaagccctcccagcccccatcgagaaaaccatctccaaagccaaagggcagccccgagaaccacaggtgtacaccctgcccccatcccgggaggagatgaccaagaaccaggtcagcctgacctgcctggtcaaaggcttctatcccagcgacatcgccgtggagtgggagagcaatgggcagccggagaacaactacaagaccacgcctcccgtgctggactccgacggctccttcttcctctatagcaagctcaccgtggacaagagcaggtggcagcaggggaacgtcttctcatgctccgtgatgcatgaggctctgcacaaccactacacgcagaagagcctctccctgtctcccgggggaggcggtggatcctctccaggtcaaggtactcaatccgaaaactcctgcacccacttcccgggtaacctgccgaacatgctgcgtgacctgcgtgacgctttctcccgtgttaaaaccttcttccagatgaaagaccagctggacaacctgctgctgaaagaatccctgctggaagacttcaaaggttacctgggttgtcaggctctgtccgaaatgatccagttctacctggaagaagttatgccgcaggctgaaaaccaggacccggacatcaaagctcacgttaactccctgggtgaaaacctgaaaaccctgcgtctgcgtctgcgccgttgccatcgattcctgccgtgcgaaaacggtggcggttctggtggtaaatccaaagctgttgaacaggttaaaaacgctttcaacaaactgcaggaaaaaggtatctacttagctatgtccgaattcgacatcttcatcaactacatcgaagcttacatgaccatgaaaatccgtaactag

SEQ ID NO: 434 - DNA, 711 bp, synthetic construct; identical to SEQ ID NO: 432
  misc_feature 1..711: note = Synthetic
  source 1..711: mol_type = other DNA

SEQ ID NO: 435 - DNA, 1941 bp, synthetic construct
  misc_feature 1..1941: note = Synthetic
  source 1..1941: mol_type = other DNA
atggacatgagggtgcccgctcagctcctggggctcctgctgctgtggctgagaggtgcgcgctgtcaggtgcagctggtgcagtctggggctgaggtgaagaagcctggggcctcagtgaaggtgtcctgcaaggcttctggatacaccttcaccagttatgatatcaactgggtgcgacaggccactggacaagggcttgagtggatgggatggatgaaccctaacaggggtaacacaggctatgtaaagaagttccagggcagagtcaccatgaccagggacacctccatcagcacagcctacatggagctgagtagtctgagatctgaggacacggccgtgtattactgtgcgagaaggagggccgtgtatcgcagcagctgggagtggtacttcgatctctggggccgtggcaccctggtcactgtctcctcagcctccaccaagggcccatcggtcttccccctggcaccctcctccaagagcacctctgggggcacagcggccctgggctgcctggtcaaggactacttccccgaaccggtgacggtgtcgtggaactcaggcgccctgaccagcggcgtgcacaccttcccggctgtcctacagtcctcaggactctactccctcagcagcgtggtgaccgtgccctccagcagcttgggcacccagacctacatctgcaacgtgaatcacaagcccagcaacaccaaggtggacaagaaagttgagcccaaatcttgtgacaaaactcacacatgcccaccgtgcccagcacctgaactcctggggggaccgtcagtcttcctcttccccccaaaacccaaggacaccctcatgatctcccggacccctgaggtcacatgcgtggtggtggacgtgagccacgaagaccctgaggtcaagttcaactggtacgtggacggcgtggaggtgcataatgccaagacaaagccgtgcgaggagcagtacggcagcacgtaccgttgcgtcagcgtcctcaccgtcctgcaccaggactggctgaatggcaaggagtacaagtgcaaggtgtccaacaaagccctcccagcccccatcgagaaaaccatctccaaagccaaagggcagccccgagaaccacaggtgtacaccctgcccccatcccgggaggagatgaccaagaaccaggtcagcctgacctgcctggtcaaaggcttctatcccagcgacatcgccgtggagtgggagagcaatgggcagccggagaacaactacaagaccacgcctcccgtgctggactccgacggctccttcttcctctatagcaagctcaccgtggacaagagcaggtggcagcaggggaacgtcttctcatgctccgtgatgcatgaggctctgcacaaccactacacgcagaagagcctctccctgtctcccgggggaggcggtggatcctctccaggtcaaggtactcaatccgaaaactcctgcacccacttcccgggtaacctgccgaacatgctgcgtgacctgcgtgacgctttctcccgtgttaaaaccttcttccagatgaaagaccagctggacaacctgctgctgaaagaatccctgctggaagacttcaaaggttacctgggttgtcaggctctgtccgaaatgatccagttctacctggaagaagttatgccgcaggctgaaaaccaggacccggacatcaaagctcacgttaactccctgggtgaaaacctgaaaaccctgcgtctgcgtctgcgccgttgccatcgattcctgccgtgcgaaaacggtggcggttctggtggtaaatccaaagctgttgaacaggttaaaaacgctttcaacaaactgcaggaaaaaggtatctacgacgctatgtccgaattcgacatcttcatcaactacatcgaagcttacatgaccatgaaaatccgtaactag

SEQ ID NO: 436 - DNA, 711 bp, synthetic construct; identical to SEQ ID NO: 432
  misc_feature 1..711: note = Synthetic
  source 1..711: mol_type = other DNA

SEQ ID NO: 437 - DNA, 1941 bp, synthetic construct
  misc_feature 1..1941: note = Synthetic
  source 1..1941: mol_type = other DNA
atggacatgagggtgcccgctcagctcctggggctcctgctgctgtggctgagaggtgcgcgctgtcaggtgcagctggtgcagtctggggctgaggtgaagaagcctggggcctcagtgaaggtgtcctgcaaggcttctggatacaccttcaccagttatgatatcaactgggtgcgacaggccactggacaagggcttgagtggatgggatggatgaaccctaacaggggtaacacaggctatgtaaagaagttccagggcagagtcaccatgaccagggacacctccatcagcacagcctacatggagctgagtagtctgagatctgaggacacggccgtgtattactgtgcgagaaggagggccgtgtatcgcagcagctgggagtggtacttcgatctctggggccgtggcaccctggtcactgtctcctcagcctccaccaagggcccatcggtcttccccctggcaccctcctccaagagcacctctgggggcacagcggccctgggctgcctggtcaaggactacttccccgaaccggtgacggtgtcgtggaactcaggcgccctgaccagcggcgtgcacaccttcccggctgtcctacagtcctcaggactctactccctcagcagcgtggtgaccgtgccctccagcagcttgggcacccagacctacatctgcaacgtgaatcacaagcccagcaacaccaaggtggacaagaaagttgagcccaaatcttgtgacaaaactcacacatgcccaccgtgcccagcacctgaactcctggggggaccgtcagtcttcctcttccccccaaaacccaaggacaccctcatgatctcccggacccctgaggtcacatgcgtggtggtggacgtgagccacgaagaccctgaggtcaagttcaactggtacgtggacggcgtggaggtgcataatgccaagacaaagccgtgcgaggagcagtacggcagcacgtaccgttgcgtcagcgtcctcaccgtcctgcaccaggactggctgaatggcaaggagtacaagtgcaaggtgtccaacaaagccctcccagcccccatcgagaaaaccatctccaaagccaaagggcagccccgagaaccacaggtgtacaccctgcccccatcccgggaggagatgaccaagaaccaggtcagcctgacctgcctggtcaaaggcttctatcccagcgacatcgccgtggagtgggagagcaatgggcagccggagaacaactacaagaccacgcctcccgtgctggactccgacggctccttcttcctctatagcaagctcaccgtggacaagagcaggtggcagcaggggaacgtcttctcatgctccgtgatgcatgaggctctgcacaaccactacacgcagaagagcctctccctgtctcccgggggaggcggtggatcctctccaggtcaaggtactcaatccgaaaactcctgcacccacttcccgggtaacctgccgaacatgctgcgtgacctgcgtgacgctttctcccgtgttaaaaccttcttccagatgaaaggccagctggacaacctgctgctgaaagaatccctgctggaagacttcaaaggttacctgggttgtcaggctctgtccgaaatgatccagttctacctggaagaagttatgccgcaggctgaaaaccaggacccggacatcaaagctcacgttaactccctgggtgaaaacctgaaaaccctgcgtctgcgtctgcgccgttgccatcgattcctgccgtgcgaaaacggtggcggttctggtggtaaatccaaagctgttgaacaggttaaaaacgctttcaacaaactgcaggaaaaaggtatctacaaagctatgtccgaattcgacatcttcatcaactacatcgaagcttacatgaccatgaaaatccgtaactag

SEQ ID NO: 438 - DNA, 711 bp, synthetic construct; identical to SEQ ID NO: 432
  misc_feature 1..711: note = Synthetic
  source 1..711: mol_type = other DNA

SEQ ID NO: 439 - DNA, 1941 bp, synthetic construct
  misc_feature 1..1941: note = Synthetic
  source 1..1941: mol_type = other DNA
atggacatgagggtgcccgctcagctcctggggctcctgctgctgtggctgagaggtgcgcgctgtcaggtgcagctggtgcagtctggggctgaggtgaagaagcctggggcctcagtgaaggtgtcctgcaaggcttctggatacaccttcaccagttatgatatcaactgggtgcgacaggccactggacaagggcttgagtggatgggatggatgaaccctaacaggggtaacacaggctatgtaaagaagttccagggcagagtcaccatgaccagggacacctccatcagcacagcctacatggagctgagtagtctgagatctgaggacacggccgtgtattactgtgcgagaaggagggccgtgtatcgcagcagctgggagtggtacttcgatctctggggccgtggcaccctggtcactgtctcctcagcctccaccaagggcccatcggtcttccccctggcaccctcctccaagagcacctctgggggcacagcggccctgggctgcctggtcaaggactacttccccgaaccggtgacggtgtcgtggaactcaggcgccctgaccagcggcgtgcacaccttcccggctgtcctacagtcctcaggactctactccctcagcagcgtggtgaccgtgccctccagcagcttgggcacccagacctacatctgcaacgtgaatcacaagcccagcaacaccaaggtggacaagaaagttgagcccaaatcttgtgacaaaactcacacatgcccaccgtgcccagcacctgaactcctggggggaccgtcagtcttcctcttccccccaaaacccaaggacaccctcatgatctcccggacccctgaggtcacatgcgtggtggtggacgtgagccacgaagaccctgaggtcaagttcaactggtacgtggacggcgtggaggtgcataatgccaagacaaagccgtgcgaggagcagtacggcagcacgtaccgttgcgtcagcgtcctcaccgtcctgcaccaggactggctgaatggcaaggagtacaagtgcaaggtgtccaacaaagccctcccagcccccatcgagaaaaccatctccaaagccaaagggcagccccgagaaccacaggtgtacaccctgcccccatcccgggaggagatgaccaagaaccaggtcagcctgacctgcctggtcaaaggcttctatcccagcgacatcgccgtggagtgggagagcaatgggcagccggagaacaactacaagaccacgcctcccgtgctggactccgacggctccttcttcctctatagcaagctcaccgtggacaagagcaggtggcagcaggggaacgtcttctcatgctccgtgatgcatgaggctctgcacaaccactacacgcagaagagcctctccctgtctcccgggggaggcggtggatcctctccaggtcaaggtactcaatccgaaaactcctgcacccacttcccgggtaacctgccgaacatgctgcgtgacctgcgtgacgctttctcccgtgttaaaaccttcttccggatgaaagaccagctggacaacctgctgctgaaagaatccctgctggaagacttcaaaggttacctgggttgtcaggctctgtccgaaatgatccagttctacctggaagaagttatgccgcaggctgaaaaccaggacccggacatcaaagctcacgttaactccctgggtgaaaacctgaaaaccctgcgtctgcgtctgcgccgttgccatcgattcctgccgtgcgaaaacggtggcggttctggtggtaaatccaaagctgttgaacaggttaaaaacgctttcaacaaactgcaggaaaaaggtatctacaaagctatgtccgaattcgacatcttcatcaactacatcgaagcttacatgaccatgaaaatccgtaactag

SEQ ID NO: 440 - DNA, 711 bp, synthetic construct; identical to SEQ ID NO: 432
  misc_feature 1..711: note = Synthetic
  source 1..711: mol_type = other DNA

SEQ ID NO: 441 - DNA, 1941 bp, synthetic construct
  misc_feature 1..1941: note = Synthetic
  source 1..1941: mol_type = other DNA
atggacatgagggtgcccgctcagctcctggggctcctgctgctgtggctgagaggtgcgcgctgtcaggtgcagctggtgcagtctggggctgaggtgaagaagcctggggcctcagtgaaggtgtcctgcaaggcttctggatacaccttcaccagttatgatatcaactgggtgcgacaggccactggacaagggcttgagtggatgggatggatgaaccctaacaggggtaacacaggctatgtaaagaagttccagggcagagtcaccatgaccagggacacctccatcagcacagcctacatggagctgagtagtctgagatctgaggacacggccgtgtattactgtgcgagaaggagggccgtgtatcgcagcagctgggagtggtacttcgatctctggggccgtggcaccctggtcactgtctcctcagcctccaccaagggcccatcggtcttccccctggcaccctcctccaagagcacctctgggggcacagcggccctgggctgcctggtcaaggactacttccccgaaccggtgacggtgtcgtggaactcaggcgccctgaccagcggcgtgcacaccttcccggctgtcctacagtcctcaggactctactccctcagcagcgtggtgaccgtgccctccagcagcttgggcacccagacctacatctgcaacgtgaatcacaagcccagcaacaccaaggtggacaagaaagttgagcccaaatcttgtgacaaaactcacacatgcccaccgtgcccagcacctgaactcctggggggaccgtcagtcttcctcttccccccaaaacccaaggacaccctcatgatctcccggacccctgaggtcacatgcgtggtggtggacgtgagccacgaagaccctgaggtcaagttcaactggtacgtggacggcgtggaggtgcataatgccaagacaaagccgtgcgaggagcagtacggcagcacgtaccgttgcgtcagcgtcctcaccgtcctgcaccaggactggctgaatggcaaggagtacaagtgcaaggtgtccaacaaagccctcccagcccccatcgagaaaaccatctccaaagccaaagggcagccccgagaaccacaggtgtacaccctgcccccatcccgggaggagatgaccaagaaccaggtcagcctgacctgcctggtcaaaggcttctatcccagcgacatcgccgtggagtgggagagcaatgggcagccggagaacaactacaagaccacgcctcccgtgctggactccgacggctccttcttcctctatagcaagctcaccgtggacaagagcaggtggcagcaggggaacgtcttctcatgctccgtgatgcatgaggctctgcacaaccactacacgcagaagagcctctccctgtctcccgggggaggcggtggatcctctccaggtcaaggtactcaatccgaaaactcctgcacccacttcccgggtaacctgccgaacatgctgcgtgacctgcgtgacgctttctcccgtgttaaaaccttcttccagatgaaagaccagctggacaacaagctgctgaaagaatccctgctggaagacttcaaaggttacctgggttgtcaggctctgtccgaaatgatccagttctacctggaagaagttatgccgcaggctgaaaaccaggacccggacatcaaagctcacgttaactccctgggtgaaaacctgaaaaccctgcgtctgcgtctgcgccgttgccatcgattcctgccgtgcgaaaacggtggcggttctggtggtaaatccaaagctgttgaacaggttaaaaacgctttcaacaaactgcaggaaaaaggtatctacaaagctatgtccgaattcgacatcttcatcaactacatcgaagcttacatgaccatgaaaatccgtaactag

SEQ ID NO: 442 - DNA, 711 bp, synthetic construct; identical to SEQ ID NO: 432
  misc_feature 1..711: note = Synthetic
  source 1..711: mol_type = other DNA

SEQ ID NO: 443 - DNA, 1941 bp, synthetic construct
  misc_feature 1..1941: note = Synthetic
  source 1..1941: mol_type = other DNA
atggacatgagggtgcccgctcagctcctggggctcctgctgctgtggctgagaggtgcgcgctgtcaggtgcagctggtgcagtctggggctgaggtgaagaagcctggggcctcagtgaaggtgtcctgcaaggcttctggatacaccttcaccagttatgatatcaactgggtgcgacaggccactggacaagggcttgagtggatgggatggatgaaccctaacaggggtaacacaggctatgtaaagaagttccagggcagagtcaccatgaccagggacacctccatcagcacagcctacatggagctgagtagtctgagatctgaggacacggccgtgtattactgtgcgagaaggagggccgtgtatcgcagcagctgggagtggtacttcgatctctggggccgtggcaccctggtcactgtctcctcagcctccaccaagggcccatcggtcttccccctggcaccctcctccaagagcacctctgggggcacagcggccctgggctgcctggtcaaggactacttccccgaaccggtgacggtgtcgtggaactcaggcgccctgaccagcggcgtgcacaccttcccggctgtcctacagtcctcaggactctactccctcagcagcgtggtgaccgtgccctccagcagcttgggcacccagacctacatctgcaacgtgaatcacaagcccagcaacaccaaggtggacaagaaagttgagcccaaatcttgtgacaaaactcacacatgcccaccgtgcccagcacctgaactcctggggggaccgtcagtcttcctcttccccccaaaacccaaggacaccctcatgatctcccggacccctgaggtcacatgcgtggtggtggacgtgagccacgaagaccctgaggtcaagttcaactggtacgtggacggcgtggaggtgcataatgccaagacaaagccgtgcgaggagcagtacggcagcacgtaccgttgcgtcagcgtcctcaccgtcctgcaccaggactggctgaatggcaaggagtacaagtgcaaggtgtccaacaaagccctcccagcccccatcgagaaaaccatctccaaagccaaagggcagccccgagaaccacaggtgtacaccctgcccccatcccgggaggagatgaccaagaaccaggtcagcctgacctgcctggtcaaaggcttctatcccagcgacatcgccgtggagtgggagagcaatgggcagccggagaacaactacaagaccacgcctcccgtgctggactccgacggctccttcttcctctatagcaagctcaccgtggacaagagcaggtggcagcaggggaacgtcttctcatgctccgtgatgcatgaggctctgcacaaccactacacgcagaagagcctctccctgtctcccgggggaggcggtggatcctctccaggtcaaggtactcaatccgaaaactcctgcacccacttcccgggtaacctgccgaacatgctgcgtgacctgcgtgacgctttctcccgtgttgacaccttcttccagatgaaagaccagctggacaacctgctgctgaaagaatccctgctggaagacttcaaaggttacctgggttgtcaggctctgtccgaaatgatccagttctacctggaagaagttatgccgcaggctgaaaaccaggacccggacatcaaagctcacgttaactccctgggtgaaaacctgaaaaccctgcgtctgcgtctgcgccgttgccatcgattcctgccgtgcgaaaacggtggcggttctggtggtaaatccaaagctgttgaacaggttaaaaacgctttcaacaaactgcaggaaaaaggtatctacaaagctatgtccgaattcgacatcttcatcaactacatcgaagcttacatgaccatgaaaatccgtaactag

SEQ ID NO: 444 - DNA, 711 bp, synthetic construct; identical to SEQ ID NO: 432
  misc_feature 1..711: note = Synthetic
  source 1..711: mol_type = other DNA

SEQ ID NO: 445 - DNA, 1941 bp, synthetic construct
  misc_feature 1..1941: note = Synthetic
  source 1..1941: mol_type = other DNA
atggacatgagggtgcccgctcagctcctggggctcctgctgctgtggctgagaggtgcgcgctgtcaggtgcagctggtgcagtctggggctgaggtgaagaagcctggggcctcagtgaaggtgtcctgcaaggcttctggatacaccttcaccagttatgatatcaactgggtgcgacaggccactggacaagggcttgagtggatgggatggatgaaccctaacaggggtaacacaggctatgtaaagaagttccagggcagagtcaccatgaccagggacacctccatcagcacagcctacatggagctgagtagtctgagatctgaggacacggccgtgtattactgtgcgagaaggagggccgtgtatcgcagcagctgggagtggtacttcgatctctggggccgtggcaccctggtcactgtctcctcagcctccaccaagggcccatcggtcttccccctggcaccctcctccaagagcacctctgggggcacagcggccctgggctgcctggtcaaggactacttccccgaaccggtgacggtgtcgtggaactcaggcgccctgaccagcggcgtgcacaccttcccggctgtcctacagtcctcaggactctactccctcagcagcgtggtgaccgtgccctccagcagcttgggcacccagacctacatctgcaacgtgaatcacaagcccagcaacaccaaggtggacaagaaagttgagcccaaatcttgtgacaaaactcacacatgcccaccgtgcccagcacctgaactcctggggggaccgtcagtcttcctcttccccccaaaacccaaggacaccctcatgatctcccggacccctgaggtcacatgcgtggtggtggacgtgagccacgaagaccctgaggtcaagttcaactggtacgtggacggcgtggaggtgcataatgccaagacaaagccgtgcgaggagcagtacggcagcacgtaccgttgcgtcagcgtcctcaccgtcctgcaccaggactggctgaatggcaaggagtacaagtgcaaggtgtccaacaaagccctcccagcccccatcgagaaaaccatctccaaagccaaagggcagccccgagaaccacaggtgtacaccctgcccccatcccgggaggagatgaccaagaaccaggtcagcctgacctgcctggtcaaaggcttctatcccagcgacatcgccgtggagtgggagagcaatgggcagccggagaacaactacaagaccacgcctcccgtgctggactccgacggctccttcttcctctatagcaagctcaccgtggacaagagcaggtggcagcaggggaacgtcttctcatgctccgtgatgcatgaggctctgcacaaccactacacgcagaagagcctctccctgtctcccgggggaggcggtggatcctctccaggtcaaggtactcaatccgaaaactcctgcacccacttcccgggtaacctgccgaacatgctgcgtgacctgcgtgacgctttctcccgtgttaaaaccttcttcgagatgaaagaccagctggacaacctgctgctgaaagaatccctgctggaagacttcaaaggttacctgggttgtcaggctctgtccgaaatgatccagttctacctggaagaagttatgccgcaggctgaaaaccaggacccggacatcaaagctcacgttaactccctgggtgaaaacctgaaaaccctgcgtctgcgtctgcgccgttgccatcgattcctgccgtgcgaaaacggtggcggttctggtggtaaatccaaagctgttgaacaggttaaaaacgctttcaacaaactgcaggaaaaaggtatctacaaagctatgtccgaattcgacatcttcatcaactacatcgaagcttacatgaccatgaaaatccgtaactag

SEQ ID NO: 446 - DNA, 711 bp, synthetic construct; identical to SEQ ID NO: 432
  misc_feature 1..711: note = Synthetic
  source 1..711: mol_type = other DNA

SEQ ID NO: 447 - DNA, 1935 bp, synthetic construct
  misc_feature 1..1935: note = Synthetic
  source 1..1935: mol_type = other DNA
atggacatgagggtgcccgctcagctcctggggctcctgctgctgtggctgagaggtgcgcgctgtcaggtgcagctggtgcagtctggggctgaggtgaagaagcctggggcctcagtgaaggtgtcctgcaaggcttctggatacaccttcaccggctactatatgcactgggtgcgacaggcccctggacaagggcttgagtggatgggatggttcaaacctaatagtggtgtcacaaactatgcacagaagtttcagggcagggtcaccatgagcagggacacgtccatcagcacagcctacatggagctgagcagcctgagatctgacgacacggccgtgtattactgtgcgagagccggatacagcaccagttggaaagactggttcgacccctggggccagggaaccctggtcaccgtgtcttcagcctccaccaagggcccatcggtcttccccctggcaccctcctccaagagcacctctgggggcacagcggccctgggctgcctggtcaaggactacttccccgaaccggtgacggtgtcgtggaactcaggcgccctgaccagcggcgtgcacaccttcccggctgtcctacagtcctcaggactctactccctcagcagcgtggtgaccgtgccctccagcagcttgggcacccagacctacatctgcaacgtgaatcacaagcccagcaacaccaaggtggacaagaaagttgagcccaaatcttgtgacaaaactcacacatgcccaccgtgcccagcacctgaactcctggggggaccgtcagtcttcctcttccccccaaaacccaaggacaccctcatgatctcccggacccctgaggtcacatgcgtggtggtggacgtgagccacgaagaccctgaggtcaagttcaactggtacgtggacggcgtggaggtgcataatgccaagacaaagccgtgcgaggagcagtacggcagcacgtaccgttgcgtcagcgtcctcaccgtcctgcaccaggactggctgaatggcaaggagtacaagtgcaaggtgtccaacaaagccctcccagcccccatcgagaaaaccatctccaaagccaaagggcagccccgagaaccacaggtgtacaccctgcccccatcccgggaggagatgaccaagaaccaggtcagcctgacctgcctggtcaaaggcttctatcccagcgacatcgccgtggagtgggagagcaatgggcagccggagaacaactacaagaccacgcctcccgtgctggactccgacggctccttcttcctctatagcaagctcaccgtggacaagagcaggtggcagcaggggaacgtcttctcatgctccgtgatgcatgaggctctgcacaaccactacacgcagaagagcctctccctgtctcccgggggaggcggtggatcctctccaggtcaaggtactcaatccgaaaactcctgcacccacttcccgggtaacctgccgaacatgctgcgtgacctgcttgacgctttctcccgtgttaaaaccttcttccagatgaaagaccagctggacaacctgctgctgaaagaatccctgctggaagacttcaaaggttacctgggttgtcaggctctgtccgaaatgatccagttctacctggaagaagttatgccgcaggctgaaaaccaggacccggacatcaaagctcacgttaactccctgggtgaaaacctgaaaaccctgcgtctgcgtctgcgccgttgccatcgattcctgccgtgcgaaaacggtggcggttctggtggtaaatccaaagctgttgaacaggttaaaaacgctttcaacaaactgcaggaaaaaggtatctacaaagctatgtccgaattcgacatcttcatcaactacatcgaagcttacatgaccatgaaaatccgtaactag

SEQ ID NO: 448 - DNA, 711 bp, synthetic construct
  misc_feature 1..711: note = Synthetic
  source 1..711: mol_type = other DNA
atggacatgagggtgcccgctcagctcctggggctcctgctgctgtggctgagaggtgcgcgctgtgacatccagatgacccagtttccatcttccgtgtctgcatctgtaggagacagagtcaccatcacttgtcgggcgagtcaggggattagcaggtggttagcctggtatcagcagaaacaagggaaagcccctaagctcctgatctatatggtatccagtttgcaaagtggggtcccatcaaggttcagtggcagtggatctgggacagatttcactctcaccatcagcagcctgcagcctgaagattttgcaacttactattgtcagcagtctcacaatttcccgatcaccttcggccaagggacacgactggacattaaacgaacggtggctgcaccatctgtcttcatcttcccgccatctgatgagcagttgaaatctggaactgcctctgttgtgtgcctgctgaataacttctatcccagagaggccaaagtacagtggaaggtggataacgccctccaatcgggtaactcccaggagagtgtcacagagcaggacagcaaggacagcacctacagcctcagcagcaccctgacgctgagcaaagcagactacgagaaacacaaagtctacgcctgcgaagtcacccatcagggcctgagctcgcccgtcacaaagagcttcaacaggggagagtgttag

SEQ ID NO: 449 - DNA, 1935 bp, synthetic construct
  misc_feature 1..1935: note = Synthetic
  source 1..1935: mol_type = other DNA
atggacatgagggtgcccgctcagctcctggggctcctgctgctgtggctgagaggtgcgcgctgtcaggtgcagctggtgcagtctggggctgaggtgaagaagcctggggcctcagtgaaggtgtcctgcaaggcttctggatacaccttcaccggctactatatgcactgggtgcgacaggcccctggacaagggcttgagtggatgggatggttcaaacctaatagtggtgtcacaaactatgcacagaagtttcagggcagggtcaccatgagcagggacacgtccatcagcacagcctacatggagctgagcagcctgagatctgacgacacggccgtgtattactgtgcgagagccggatacagcaccagttggaaagactggttcgacccctggggccagggaaccctggtcaccgtgtcttcagcctccaccaagggcccatcggtcttccccctggcaccctcctccaagagcacctctgggggcacagcggccctgggctgcctggtcaaggactacttccccgaaccggtgacggtgtcgtggaactcaggcgccctgaccagcggcgtgcacaccttcccggctgtcctacagtcctcaggactctactccctcagcagcgtggtgaccgtgccctccagcagcttgggcacccagacctacatctgcaacgtgaatcacaagcccagcaacaccaaggtggacaagaaagttgagcccaaatcttgtgacaaaactcacacatgcccaccgtgcccagcacctgaactcctggggggaccgtcagtcttcctcttccccccaaaacccaaggacaccctcatgatctcccggacccctgaggtcacatgcgtggtggtggacgtgagccacgaagaccctgaggtcaagttcaactggtacgtggacggcgtggaggtgcataatgccaagacaaagccgtgcgaggagcagtacggcagcacgtaccgttgcgtcagcgtcctcaccgtcctgcaccaggactggctgaatggcaaggagtacaagtgcaaggtgtccaacaaagccctcccagcccccatcgagaaaaccatctccaaagccaaagggcagccccgagaaccacaggtgtacaccctgcccccatcccgggaggagatgaccaagaaccaggtcagcctgacctgcctggtcaaaggcttctatcccagcgacatcgccgtggagtgggagagcaatgggcagccggagaacaactacaagaccacgcctcccgtgctggactccgacggctccttcttcctctatagcaagctcaccgtggacaagagcaggtggcagcaggggaacgtcttctcatgctccgtgatgcatgaggctctgcacaaccactacacgcagaagagcctctccctgtctcccgggggaggcggtggatcctctccaggtcaaggtactcaatccgaaaactcctgcacccacttcccgggtaacctgccgaacatgctgcgtgacctgcgtgacgctttctcccgtgttaaaaccttcttccagatgaaagaccagctggacaacctgctgctgaaagaatccctgctggaagacttcaaaggttacctgggttgtcaggctctgtccgaaatgatccagttctacctggaagaagttatgccgcaggctgaaaaccaggacccggacatcaaagctcacgttaactccctgggtgaaaacctgaaaaccctgcgtctgcgtctgcgccgttgccatcgattcctgccgtgcgaaaacggtggcggttctggtggtaaatccaaagctgttgaacaggttaaaaacgctttcaacaaactgcaggaaaaaggtatctacttagctatgtccgaattcgacatcttcatcaactacatcgaagcttacatgaccatgaaaatccgtaactag

SEQ ID NO: 450 - DNA, 711 bp, synthetic construct; identical to SEQ ID NO: 448
  misc_feature 1..711: note = Synthetic
  source 1..711: mol_type = other DNA

SEQ ID NO: 451 - DNA, 1935 bp, synthetic construct
  misc_feature 1..1935: note = Synthetic
  source 1..1935: mol_type = other DNA
atggacatgagggtgcccgctcagctcctggggctcctgctgctgtggctgagaggtgcgcgctgtcaggtgcagctggtgcagtctggggctgaggtgaagaagcctggggcctcagtgaaggtgtcctgcaaggcttctggatacaccttcaccggctactatatgcactgggtgcgacaggcccctggacaagggcttgagtggatgggatggttcaaacctaatagtggtgtcacaaactatgcacagaagtttcagggcagggtcaccatgagcagggacacgtccatcagcacagcctacatggagctgagcagcctgagatctgacgacacggccgtgtattactgtgcgagagccggatacagcaccagttggaaagactggttcgacccctggggccagggaaccctggtcaccgtgtcttcagcctccaccaagggcccatcggtcttccccctggcaccctcctccaagagcacctctgggggcacagcggccctgggctgcctggtcaaggactacttccccgaaccggtgacggtgtcgtggaactcaggcgccctgaccagcggcgtgcacaccttcccggctgtcctacagtcctcaggactctactccctcagcagcgtggtgaccgtgccctccagcagcttgggcacccagacctacatctgcaacgtgaatcacaagcccagcaacaccaaggtggacaagaaagttgagcccaaatcttgtgacaaaactcacacatgcccaccgtgcccagcacctgaactcctggggggaccgtcagtcttcctcttccccccaaaacccaaggacaccctcatgatctcccggacccctgaggtcacatgcgtggtggtggacgtgagccacgaagaccctgaggtcaagttcaactggtacgtggacggcgtggaggtgcataatgccaagacaaagccgtgcgaggagcagtacggcagcacgtaccgttgcgtcagcgtcctcaccgtcctgcaccaggactggctgaatggcaaggagtacaagtgcaaggtgtccaacaaagccctcccagcccccatcgagaaaaccatctccaaagccaaagggcagccccgagaaccacaggtgtacaccctgcccccatcccgggaggagatgaccaagaaccaggtcagcctgacctgcctggtcaaaggcttctatcccagcgacatcgccgtggagtgggagagcaatgggcagccggagaacaactacaagaccacgcctcccgtgctggactccgacggctccttcttcctctatagcaagctcaccgtggacaagagcaggtggcagcaggggaacgtcttctcatgctccgtgatgcatgaggctctgcacaaccactacacgcagaagagcctctccctgtctcccgggggaggcggtggatcctctccaggtcaaggtactcaatccgaaaactcctgcacccacttcccgggtaacctgccgaacatgctgcgtgacctgcgtgacgctttctcccgtgttaaaaccttcttccagatgaaagaccagctggacaacctgctgctgaaagaatccctgctggaagacttcaaaggttacctgggttgtcaggctctgtccgaaatgatccagttctacctggaagaagttatgccgcaggctgaaaaccaggacccggacatcaaagctcacgttaactccctgggtgaaaacctgaaaaccctgcgtctgcgtctgcgccgttgccatcgattcctgccgtgcgaaaacggtggcggttctggtggtaaatccaaagctgttgaacaggttaaaaacgctttcaacaaactgcaggaaaaaggtatctacgacgctatgtccgaattcgacatcttcatcaactacatcgaagcttacatgaccatgaaaatccgtaactag

SEQ ID NO: 452 - DNA, 711 bp, synthetic construct; identical to SEQ ID NO: 448
  misc_feature 1..711: note = Synthetic
  source 1..711: mol_type = other DNA

SEQ ID NO: 453 - DNA, 1935 bp, synthetic construct
  misc_feature 1..1935: note = Synthetic
  source 1..1935: mol_type = other DNA
atggacatgagggtgcccgctcagctcctggggctcctgctgctgtggctgagaggtgcgcgctgtcaggtgcagctggtgcagtctggggctgaggtgaagaagcctggggcctcagtgaaggtgtcctgcaaggcttctggatacaccttcaccggctactatatgcactgggtgcgacaggcccctggacaagggcttgagtggatgggatggttcaaacctaatagtggtgtcacaaactatgcacagaagtttcagggcagggtcaccatgagcagggacacgtccatcagcacagcctacatggagctgagcagcctgagatctgacgacacggccgtgtattactgtgcgagagccggatacagcaccagttggaaagactggttcgacccctggggccagggaaccctggtcaccgtgtcttcagcctccaccaagggcccatcggtcttccccctggcaccctcctccaagagcacctctgggggcacagcggccctgggctgcctggtcaaggactacttccccgaaccggtgacggtgtcgtggaactcaggcgccctgaccagcggcgtgcacaccttcccggctgtcctacagtcctcaggactctactccctcagcagcgtggtgaccgtgccctccagcagcttgggcacccagacctacatctgcaacgtgaatcacaagcccagcaacaccaaggtggacaagaaagttgagcccaaatcttgtgacaaaactcacacatgcccaccgtgcccagcacctgaactcctggggggaccgtcagtcttcctcttccccccaaaacccaaggacaccctcatgatctcccggacccctgaggtcacatgcgtggtggtggacgtgagccacgaagaccctgaggtcaagttcaactggtacgtggacggcgtggaggtgcataatgccaagacaaagccgtgcgaggagcagtacggcagcacgtaccgttgcgtcagcgtcctcaccgtcctgcaccaggactggctgaatggcaaggagtacaagtgcaaggtgtccaacaaagccctcccagcccccatcgagaaaaccatctccaaagccaaagggcagccccgagaaccacaggtgtacaccctgcccccatcccgggaggagatgaccaagaaccaggtcagcctgacctgcctggtcaaaggcttctatcccagcgacatcgccgtggagtgggagagcaatgggcagccggagaacaactacaagaccacgcctcccgtgctggactccgacggctccttcttcctctatagcaagctcaccgtggacaagagcaggtggcagcaggggaacgtcttctcatgctccgtgatgcatgaggctctgcacaaccactacacgcagaagagcctctccctgtctcccgggggaggcggtggatcctctccaggtcaaggtactcaatccgaaaactcctgcacccacttcccgggtaacctgccgaacatgctgcgtgacctgcgtgacgctttctcccgtgttaaaaccttcttccagatgaaaggccagctggacaacctgctgctgaaagaatccctgctggaagacttcaaaggttacctgggttgtcaggctctgtccgaaatgatccagttctacctggaagaagttatgccgcaggctgaaaaccaggacccggacatcaaagctcacgttaactccctgggtgaaaacctgaaaaccctgcgtctgcgtctgcgccgttgccatcgattcctgccgtgcgaaaacggtggcggttctggtggtaaatccaaagctgttgaacaggttaaaaacgctttcaacaaactgcaggaaaaaggtatctacaaagctatgtccgaattcgacatcttcatcaactacatcgaagcttacatgaccatgaaaatccgtaactag

SEQ ID NO: 454 - DNA, 711 bp, synthetic construct; identical to SEQ ID NO: 448
  misc_feature 1..711: note = Synthetic
  source 1..711: mol_type = other DNA

SEQ ID NO: 455 - DNA, 1935 bp, synthetic construct
  misc_feature 1..1935: note = Synthetic
  source 1..1935: mol_type = other DNA
atggacatgagggtgcccgctcagctcctggggctcctgctgctgtggctgagaggtgcgcgctgtcaggtgcagctggtgcagtctggggctgaggtgaagaagcctggggcctcagtgaaggtgtcctgcaaggcttctggatacaccttcaccggctactatatgcactgggtgcgacaggcccctggacaagggcttgagtggatgggatggttcaaacctaatagtggtgtcacaaactatgcacagaagtttcagggcagggtcaccatgagcagggacacgtccatcagcacagcctacatggagctgagcagcctgagatctgacgacacggccgtgtattactgtgcgagagccggatacagcaccagttggaaagactggttcgacccctggggccagggaaccctggtcaccgtgtcttcagcctccaccaagggcccatcggtcttccccctggcaccctcctccaagagcacctctgggggcacagcggccctgggctgcctggtcaaggactacttccccgaaccggtgacggtgtcgtggaactcaggcgccctgaccagcggcgtgcacaccttcccggctgtcctacagtcctcaggactctactccctcagcagcgtggtgaccgtgccctccagcagcttgggcacccagacctacatctgcaacgtgaatcacaagcccagcaacaccaaggtggacaagaaagttgagcccaaatcttgtgacaaaactcacacatgcccaccgtgcccagcacctgaactcctggggggaccgtcagtcttcctcttccccccaaaacccaaggacaccctcatgatctcccggacccctgaggtcacatgcgtggtggtggacgtgagccacgaagaccctgaggtcaagttcaactggtacgtggacggcgtggaggtgcataatgccaagacaaagccgtgcgaggagcagtacggcagcacgtaccgttgcgtcagcgtcctcaccgtcctgcaccaggactggctgaatggcaaggagtacaagtgcaaggtgtccaacaaagccctcccagcccccatcgagaaaaccatctccaaagccaaagggcagccccgagaaccacaggtgtacaccctgcccccatcccgggaggagatgaccaagaaccaggtcagcctgacctgcctggtcaaaggcttctatcccagcgacatcgccgtggagtgggagagcaatgggcagccggagaacaactacaagaccacgcctcccgtgctggactccgacggctccttcttcctctatagcaagctcaccgtggacaagagcaggtggcagcaggggaacgtcttctcatgctccgtgatgcatgaggctctgcacaaccactacacgcagaagagcctctccctgtctcccgggggaggcggtggatcctctccaggtcaaggtactcaatccgaaaactcctgcacccacttcccgggtaacctgccgaacatgctgcgtgacctgcgtgacgctttctcccgtgttaaaaccttcttccggatgaaagaccagctggacaacctgctgctgaaagaatccctgctggaagacttcaaaggttacctgggttgtcaggctctgtccgaaatgatccagttctacctggaagaagttatgccgcaggctgaaaaccaggacccggacatcaaagctcacgttaactccctgggtgaaaacctgaaaaccctgcgtctgcgtctgcgccgttgccatcgattcctgccgtgcgaaaacggtggcggttctggtggtaaatccaaagctgttgaacaggttaaaaacgctttcaacaaactgcaggaaaaaggtatctacaaagctatgtccgaattcgacatcttcatcaactacatcgaagcttacatgaccatgaaaatccgtaactag

SEQ ID NO: 456 - DNA, 711 bp, synthetic construct; identical to SEQ ID NO: 448
  misc_feature 1..711: note = Synthetic
  source 1..711: mol_type = other DNA

SEQ ID NO: 457 - DNA, 1935 bp, synthetic construct
  misc_feature 1..1935: note = Synthetic
  source 1..1935: mol_type = other DNA
atggacatgagggtgcccgctcagctcctggggctcctgctgctgtggctgagaggtgcgcgctgtcaggtgcagctggtgcagtctggggctgaggtgaagaagcctggggcctcagtgaaggtgtcctgcaaggcttctggatacaccttcaccggctactatatgcactgggtgcgacaggcccctggacaagggcttgagtggatgggatggttcaaacctaatagtggtgtcacaaactatgcacagaagtttcagggcagggtcaccatgagcagggacacgtccatcagcacagcctacatggagctgagcagcctgagatctgacgacacggccgtgtattactgtgcgagagccggatacagcaccagttggaaagactggttcgacccctggggccagggaaccctggtcaccgtgtcttcagcctccaccaagggcccatcggtcttccccctggcaccctcctccaagagcacctctgggggcacagcggccctgggctgcctggtcaaggactacttccccgaaccggtgacggtgtcgtggaactcaggcgccctgaccagcggcgtgcacaccttcccggctgtcctacagtcctcaggactctactccctcagcagcgtggtgaccgtgccctccagcagcttgggcacccagacctacatctgcaacgtgaatcacaagcccagcaacaccaaggtggacaagaaagttgagcccaaatcttgtgacaaaactcacacatgcccaccgtgcccagcacctgaactcctggggggaccgtcagtcttcctcttccccccaaaacccaaggacaccctcatgatctcccggacccctgaggtcacatgcgtggtggtggacgtgagccacgaagaccctgaggtcaagttcaactggtacgtggacggcgtggaggtgcataatgccaagacaaagccgtgcgaggagcagtacggcagcacgtaccgttgcgtcagcgtcctcaccgtcctgcaccaggactggctgaatggcaaggagtacaagtgcaaggtgtccaacaaagccctcccagcccccatcgagaaaaccatctccaaagccaaagggcagccccgagaaccacaggtgtacaccctgcccccatcccgggaggagatgaccaagaaccaggtcagcctgacctgcctggtcaaaggcttctatcccagcgacatcgccgtggagtgggagagcaatgggcagccggagaacaactacaagaccacgcctcccgtgctggactccgacggctccttcttcctctatagcaagctcaccgtggacaagagcaggtggcagcaggggaacgtcttctcatgctccgtgatgcatgaggctctgcacaaccactacacgcagaagagcctctccctgtctcccgggggaggcggtggatcctctccaggtcaaggtactcaatccgaaaactcctgcacccacttcccgggtaacctgccgaacatgctgcgtgacctgcgtgacgctttctcccgtgttaaaaccttcttccagatgaaagaccagctggacaacaagctgctgaaagaatccctgctggaagacttcaaaggttacctgggttgtcaggctctgtccgaaatgatccagttctacctggaagaagttatgccgcaggctgaaaaccaggacccggacatcaaagctcacgttaactccctgggtgaaaacctgaaaaccctgcgtctgcgtctgcgccgttgccatcgattcctgccgtgcgaaaacggtggcggttctggtggtaaatccaaagctgttgaacaggttaaaaacgctttcaacaaactgcaggaaaaaggtatctacaaagctatgtccgaattcgacatcttcatcaactacatcgaagcttacatgaccatgaaaatccgtaactag

SEQ ID NO: 458 - DNA, 711 bp, synthetic construct; identical to SEQ ID NO: 448
  misc_feature 1..711: note = Synthetic
  source 1..711: mol_type = other DNA

SEQ ID NO: 459 - DNA, 1935 bp, synthetic construct
  misc_feature 1..1935: note = Synthetic
  source 1..1935: mol_type = other DNA
atggacatgagggtgcccgctcagctcctggggctcctgctgctgtggctgagaggtgcgcgctgtcaggtgcagctggtgcagtctggggctgaggtgaagaagcctggggcctcagtgaaggtgtcctgcaaggcttctggatacaccttcaccggctactatatgcactgggtgcgacaggcccctggacaagggcttgagtggatgggatggttcaaacctaatagtggtgtcacaaactatgcacagaagtttcagggcagggtcaccatgagcagggacacgtccatcagcacagcctacatggagctgagcagcctgagatctgacgacacggccgtgtattactgtgcgagagccggatacagcaccagttggaaagactggttcgacccctggggccagggaaccctggtcaccgtgtcttcagcctccaccaagggcccatcggtcttccccctggcaccctcctccaagagcacctctgggggcacagcggccctgggctgcctggtcaaggactacttccccgaaccggtgacggtgtcgtggaactcaggcgccctgaccagcggcgtgcacaccttcccggctgtcctacagtcctcaggactctactccctcagcagcgtggtgaccgtgccctccagcagcttgggcacccagacctacatctgcaacgtgaatcacaagcccagcaacaccaaggtggacaagaaagttgagcccaaatcttgtgacaaaactcacacatgcccaccgtgcccagcacctgaactcctggggggaccgtcagtcttcctcttccccccaaaacccaaggacaccctcatgatctcccggacccctgaggtcacatgcgtggtggtggacgtgagccacgaagaccctgaggtcaagttcaactggtacgtggacggcgtggaggtgcataatgccaagacaaagccgtgcgaggagcagtacggcagcacgtaccgttgcgtcagcgtcctcaccgtcctgcaccaggactggctgaatggcaaggagtacaagtgcaaggtgtccaacaaagccctcccagcccccatcgagaaaaccatctccaaagccaaagggcagccccgagaaccacaggtgtacaccctgcccccatcccgggaggagatgaccaagaaccaggtcagcctgacctgcctggtcaaaggcttctatcccagcgacatcgccgtggagtgggagagcaatgggcagccggagaacaactacaagaccacgcctcccgtgctggactccgacggctccttcttcctctatagcaagctcaccgtggacaagagcaggtggcagcaggggaacgtcttctcatgctccgtgatgcatgaggctctgcacaaccactacacgcagaagagcctctccctgtctcccgggggaggcggtggatcctctccaggtcaaggtactcaatccgaaaactcctgcacccacttcccgggtaacctgccgaacatgctgcgtgacctgcgtgacgctttctcccgtgttgacaccttcttccagatgaaagaccagctggacaacctgctgctgaaagaatccctgctggaagacttcaaaggttacctgggttgtcaggctctgtccgaaatgatccagttctacctggaagaagttatgccgcaggctgaaaaccaggacccggacatcaaagctcacgttaactccctgggtgaaaacctgaaaaccctgcgtctgcgtctgcgccgttgccatcgattcctgccgtgcgaaaacggtggcggttctggtggtaaatccaaagctgttgaacaggttaaaaacgctttcaacaaactgcaggaaaaaggtatctacaaagctatgtccgaattcgacatcttcatcaactacatcgaagcttacatgaccatgaaaatccgtaactag

SEQ ID NO: 460 - DNA, 711 bp, synthetic construct; identical to SEQ ID NO: 448
  misc_feature 1..711: note = Synthetic
  source 1..711: mol_type = other DNA

SEQ ID NO: 461 - DNA, 1935 bp, synthetic construct
  misc_feature 1..1935: note = Synthetic
  source 1..1935: mol_type = other DNA
atggacatgagggtgcccgctcagctcctggggctcctgctgctgtggctgagaggtgcgcgctgtcaggtgcagctggtgcagtctggggctgaggtgaagaagcctggggcctcagtgaaggtgtcctgcaaggcttctggatacaccttcaccggctactatatgcactgggtgcgacaggcccctggacaagggcttgagtggatgggatggttcaaacctaatagtggtgtcacaaactatgcacagaagtttcagggcagggtcaccatgagcagggacacgtccatcagcacagcctacatggagctgagcagcctgagatctgacgacacggccgtgtattactgtgcgagagccggatacagcaccagttggaaagactggttcgacccctggggccagggaaccctggtcaccgtgtcttcagcctccaccaagggcccatcggtcttccccctggcaccctcctccaagagcacctctgggggcacagcggccctgggctgcctggtcaaggactacttccccgaaccggtgacggtgtcgtggaactcaggcgccctgaccagcggcgtgcacaccttcccggctgtcctacagtcctcaggactctactccctcagcagcgtggtgaccgtgccctccagcagcttgggcacccagacctacatctgcaacgtgaatcacaagcccagcaacaccaaggtggacaagaaagttgagcccaaatcttgtgacaaaactcacacatgcccaccgtgcccagcacctgaactcctggggggaccgtcagtcttcctcttccccccaaaacccaaggacaccctcatgatctcccggacccctgaggtcacatgcgtggtggtggacgtgagccacgaagaccctgaggtcaagttcaactggtacgtggacggcgtggaggtgcataatgccaagacaaagccgtgcgaggagcagtacggcagcacgtaccgttgcgtcagcgtcctcaccgtcctgcaccaggactggctgaatggcaaggagtacaagtgcaaggtgtccaacaaagccctcccagcccccatcgagaaaaccatctccaaagccaaagggcagccccgagaaccacaggtgtacaccctgcccccatcccgggaggagatgaccaagaaccaggtcagcctgacctgcctggtcaaaggcttctatcccagcgacatcgccgtggagtgggagagcaatgggcagccggagaacaactacaagaccacgcctcccgtgctggactccgacggctccttcttcctctatagcaagctcaccgtggacaagagcaggtggcagcaggggaacgtcttctcatgctccgtgatgcatgaggctctgcacaaccactacacgcagaagagcctctccctgtctcccgggggaggcggtggatcctctccaggtcaaggtactcaatccgaaaactcctgcacccacttcccgggtaacctgccgaacatgctgcgtgacctgcgtgacgctttctcccgtgttaaaaccttcttcgagatgaaagaccagctggacaacctgctgctgaaagaatccctgctggaagacttcaaaggttacctgggttgtcaggctctgtccgaaatgatccagttctacctggaagaagttatgccgcaggctgaaaaccaggacccggacatcaaagctcacgttaactccctgggtgaaaacctgaaaaccctgcgtctgcgtctgcgccgttgccatcgattcctgccgtgcgaaaacggtggcggttctggtggtaaatccaaagctgttgaacaggttaaaaacgctttcaacaaactgcaggaaaaaggtatctacaaagctatgtccgaattcgacatcttcatcaactacatcgaagcttacatgaccatgaaaatccgtaactag

SEQ ID NO: 462 - DNA, 711 bp, synthetic construct; identical to SEQ ID NO: 448
  misc_feature 1..711: note = Synthetic
  source 1..711: mol_type = other DNA

SEQ ID NO: 463 - DNA, 1932 bp, synthetic construct
  misc_feature 1..1932: note = Synthetic
  source 1..1932: mol_type = other DNA
atggacatgagggtgcccgctcagctcctggggctcctgctgctgtggctgagaggtgcgcgctgtcaggtgcagctggtgcagtctggggctgaggtgaagaagcctggggcctcagtgaaggtgtcctgcaaggcttctggatacaccttcaacggctactatatccactgggtgcgacaggcccctggacaagggcttgagtggatgggatggctcaacccaaacagtggtggcgcaaactatgcacagaagtttcagggctgggtcaccatgaccagggacacgtccatcagcacagcctacatggagctgagcaggctgacatctgacgacacggccgtgtattactgtgcgagagatcagaggaagaccacggtgactccctttgagtactggggccagggaaccctggtcaccgtgtcctcagcctccaccaagggcccatcggtcttccccctggcaccctcctccaagagcacctctgggggcacagcggccctgggctgcctggtcaaggactacttccccgaaccggtgacggtgtcgtggaactcaggcgccctgaccagcggcgtgcacaccttcccggctgtcctacagtcctcaggactctactccctcagcagcgtggtgaccgtgccctccagcagcttgggcacccagacctacatctgcaacgtgaatcacaagcccagcaacaccaaggtggacaagaaagttgagcccaaatcttgtgacaaaactcacacatgcccaccgtgcccagcacctgaactcctggggggaccgtcagtcttcctcttccccccaaaacccaaggacaccctcatgatctcccggacccctgaggtcacatgcgtggtggtggacgtgagccacgaagaccctgaggtcaagttcaactggtacgtggacggcgtggaggtgcataatgccaagacaaagccgtgcgaggagcagtacggcagcacgtaccgttgcgtcagcgtcctcaccgtcctgcaccaggactggctgaatggcaaggagtacaagtgcaaggtgtccaacaaagccctcccagcccccatcgagaaaaccatctccaaagccaaagggcagccccgagaaccacaggtgtacaccctgcccccatcccgggaggagatgaccaagaaccaggtcagcctgacctgcctggtcaaaggcttctatcccagcgacatcgccgtggagtgggagagcaatgggcagccggagaacaactacaagaccacgcctcccgtgctggactccgacggctccttcttcctctatagcaagctcaccgtggacaagagcaggtggcagcaggggaacgtcttctcatgctccgtgatgcatgaggctctgcacaaccactacacgcagaagagcctctccctgtctcccgggggaggcggtggatcctctccaggtcaaggtactcaatccgaaaactcctgcacccacttcccgggtaacctgccgaacatgctgcgtgacctgcttgacgctttctcccgtgttaaaaccttcttccagatgaaagaccagctggacaacctgctgctgaaagaatccctgctggaagacttcaaaggttacctgggttgtcaggctctgtccgaaatgatccagttctacctggaagaagttatgccgcaggctgaaaaccaggacccggacatcaaagctcacgttaactccctgggtgaaaacctgaaaaccctgcgtctgcgtctgcgccgttgccatcgattcctgccgtgcgaaaacggtggcggttctggtggtaaatccaaagctgttgaacaggttaaaaacgctttcaacaaactgcaggaaaaaggtatctacaaagctatgtccgaattcgacatcttcatcaactacatcgaagcttacatgaccatgaaaatccgtaactag

SEQ ID NO: 464 - DNA, 693 bp, synthetic construct
  misc_feature 1..693: note = Synthetic
  source 1..693: mol_type = other DNA
atggcctgggctctgctgctcctcaccctcctcactcagggcacagggtcctgggcctcctatgagctgactcagccaccctcagtgtccgtgtccccaggacagacagccagcatcacctgctctggagataaattgggggagagaaatgttagctggtatcagttgaagccaggccagtcccctattctggtcatctatcaagataacaagcggccctcagggatccctgagcgattctctggctccaagtctgggaacacagccattctgaccatcagcgggacccaggcaatggatgaggctgactattactgtcaggcgtgggacagaaatgtggtattcggcggagggaccaagctgaccgtcctaggtcagcccaaggctgcaccctcggtcactctgttcccgccctcctctgaggagcttcaagccaacaaggccacactggtgtgtctcatcagtgacttctacccgggagccgtgacagtggcctggaaggcagatagcagccccgtcaaggcgggagtggaaaccaccacaccctccaaacaaagcaacaacaagtacgcggccagcagctatctgagcctgacgcctgagcagtggaagtcccacagaagctacagctgccaggtcacgcatgaagggagcaccgtggagaagacagtggcccctacagaatgttcatag

SEQ ID NO: 465 - DNA, 1932 bp, synthetic construct
  misc_feature 1..1932: note = Synthetic
  source 1..1932: mol_type = other DNA
atggacatgagggtgcccgctcagctcctggggctcctgctgctgtggctgagaggtgcgcgctgtcaggtgcagctggtgcagtctggggctgaggtgaagaagcctggggcctcagtgaaggtgtcctgcaaggcttctggatacaccttcaacggctactatatccactgggtgcgacaggcccctggacaagggcttgagtggatgggatggctcaacccaaacagtggtggcgcaaactatgcacagaagtttcagggctgggtcaccatgaccagggacacgtccatcagcacagcctacatggagctgagcaggctgacatctgacgacacggccgtgtattactgtgcgagagatcagaggaagaccacggtgactccctttgagtactggggccagggaaccctggtcaccgtgtcctcagcctccaccaagggcccatcggtcttccccctggcaccctcctccaagagcacctctgggggcacagcggccctgggctgcctggtcaaggactacttccccgaaccggtgacggtgtcgtggaactcaggcgccctgaccagcggcgtgcacaccttcccggctgtcctacagtcctcaggactctactccctcagcagcgtggtgaccgtgccctccagcagcttgggcacccagacctacatctgcaacgtgaatcacaagcccagcaacaccaaggtggacaagaaagttgagcccaaatcttgtgacaaaactcacacatgcccaccgtgcccagcacctgaactcctggggggaccgtcagtcttcctcttccccccaaaacccaaggacaccctcatgatctcccggacccctgaggtcacatgcgtggtggtggacgtgagccacgaagaccctgaggtcaagttcaactggtacgtggacggcgtggaggtgcataatgccaagacaaagccgtgcgaggagcagtacggcagcacgtaccgttgcgtcagcgtcctcaccgtcctgcaccaggactggctgaatggcaaggagtacaagtgcaaggtgtccaacaaagccctcccagcccccatcgagaaaaccatctccaaagccaaagggcagccccgagaaccacaggtgtacaccctgcccccatcccgggaggagatgaccaagaaccaggtcagcctgacctgcctggtcaaaggcttctatcccagcgacatcgccgtggagtgggagagcaatgggcagccggagaacaactacaagaccacgcctcccgtgctggactccgacggctccttcttcctctatagcaagctcaccgtggacaagagcaggtggcagcaggggaacgtcttctcatgctccgtgatgcatgaggctctgcacaaccactacacgcagaagagcctctccctgtctcccgggggaggcggtggatcctctccaggtcaaggtactcaatccgaaaactcctgcacccacttcccgggtaacctgccgaacatgctgcgtgacctgcgtgacgctttctcccgtgttaaaaccttcttccagatgaaagaccagctggacaacctgctgctgaaagaatccctgctggaagacttcaaaggttacctgggttgtcaggctctgtccgaaatgatccagttctacctggaagaagttatgccgcaggctgaaaaccaggacccggacatcaaagctcacgttaactccctgggtgaaaacctgaaaaccctgcgtctgcgtctgcgccgttgccatcgattcctgccgtgcgaaaacggtggcggttctggtggtaaatccaaagctgttgaacaggttaaaaacgctttcaacaaactgcaggaaaaaggtatctacttagctatgtccgaattcgacatcttcatcaactacatcgaagcttacatgaccatgaaaatccgtaactag

SEQ ID NO: 466 - DNA, 693 bp, synthetic construct; identical to SEQ ID NO: 464
  misc_feature 1..693: note = Synthetic
  source 1..693: mol_type = other DNA

SEQ ID NO: 467 - DNA, 1932 bp, synthetic construct
  misc_feature 1..1932: note = Synthetic
  source 1..1932: mol_type = other DNA
atggacatgagggtgcccgctcagctcctggggctcctgctgctgtggctgagaggtgcgcgctgtcaggtgcagctggtgcagtctggggctgaggtgaagaagcctggggcctcagtgaaggtgtcctgcaaggcttctggatacaccttcaacggctactatatccactgggtgcgacaggcccctggacaagggcttgagtggatgggatggctcaacccaaacagtggtggcgcaaactatgcacagaagtttcagggctgggtcaccatgaccagggacacgtccatcagcacagcctacatggagctgagcaggctgacatctgacgacacggccgtgtattactgtgcgagagatcagaggaagaccacggtgactccctttgagtactggggccagggaaccctggtcaccgtgtcctcagcctccaccaagggcccatcggtcttccccctggcaccctcctccaagagcacctctgggggcacagcggccctgggctgcctggtcaaggactacttccccgaaccggtgacggtgtcgtggaactcaggcgccctgaccagcggcgtgcacaccttcccggctgtcctacagtcctcaggactctactccctcagcagcgtggtgaccgtgccctccagcagcttgggcacccagacctacatctgcaacgtgaatcacaagcccagcaacaccaaggtggacaagaaagttgagcccaaatcttgtgacaaaactcacacatgcccaccgtgcccagcacctgaactcctggggggaccgtcagtcttcctcttccccccaaaacccaaggacaccctcatgatctcccggacccctgaggtcacatgcgtggtggtggacgtgagccacgaagaccctgaggtcaagttcaactggtacgtggacggcgtggaggtgcataatgccaagacaaagccgtgcgaggagcagtacggcagcacgtaccgttgcgtcagcgtcctcaccgtcctgcaccaggactggctgaatggcaaggagtacaagtgcaaggtgtccaacaaagccctcccagcccccatcgagaaaaccatctccaaagccaaagggcagccccgagaaccacaggtgtacaccctgcccccatcccgggaggagatgaccaagaaccaggtcagcctgacctgcctggtcaaaggcttctatcccagcgacatcgccgtggagtgggagagcaatgggcagccggagaacaactacaagaccacgcctcccgtgctggactccgacggctccttcttcctctatagcaagctcaccgtggacaagagcaggtggcagcaggggaacgtcttctcatgctccgtgatgcatgaggctctgcacaaccactacacgcagaagagcctctccctgtctcccgggggaggcggtggatcctctccaggtcaaggtactcaatccgaaaactcctgcacccacttcccgggtaacctgccgaacatgctgcgtgacctgcgtgacgctttctcccgtgttaaaaccttcttccagatgaaagaccagctggacaacctgctgctgaaagaatccctgctggaagacttcaaaggttacctgggttgtcaggctctgtccgaaatgatccagttctacctggaagaagttatgccgcaggctgaaaaccaggacccggacatcaaagctcacgttaactccctgggtgaaaacctgaaaaccctgcgtctgcgtctgcgccgttgccatcgattcctgccgtgcgaaaacggtggcggttctggtggtaaatccaaagctgttgaacaggttaaaaacgctttcaacaaactgcaggaaaaaggtatctacgacgctatgtccgaattcgacatcttcatcaactacatcgaagcttacatgaccatgaaaatccgtaactag

SEQ ID NO: 468 - DNA, 693 bp, synthetic construct; identical to SEQ ID NO: 464
  misc_feature 1..693: note = Synthetic
  source 1..693: mol_type = other DNA

SEQ ID NO: 469 - DNA, 1932 bp, synthetic construct
  misc_feature 1..1932: note = Synthetic
  source 1..1932: mol_type = other DNA
atggacatgagggtgcccgctcagctcctggggctcctgctgctgtggctgagaggtgcgcgctgtcaggtgcagctggtgcagtctggggctgaggtgaagaagcctggggcctcagtgaaggtgtcctgcaaggcttctggatacaccttcaacggctactatatccactgggtgcgacaggcccctggacaagggcttgagtggatgggatggctcaacccaaacagtggtggcgcaaactatgcacagaagtttcagggctgggtcaccatgaccagggacacgtccatcagcacagcctacatggagctgagcaggctgacatctgacgacacggccgtgtattactgtgcgagagatcagaggaagaccacggtgactccctttgagtactggggccagggaaccctggtcaccgtgtcctcagcctccaccaagggcccatcggtcttccccctggcaccctcctccaagagcacctctgggggcacagcggccctgggctgcctggtcaaggactacttccccgaaccggtgacggtgtcgtggaactcaggcgccctgaccagcggcgtgcacaccttcccggctgtcctacagtcctcaggactctactccctcagcagcgtggtgaccgtgccctccagcagcttgggcacccagacctacatctgcaacgtgaatcacaagcccagcaacaccaaggtggacaagaaagttgagcccaaatcttgtgacaaaactcacacatgcccaccgtgcccagcacctgaactcctggggggaccgtcagtcttcctcttccccccaaaacccaaggacaccctcatgatctcccggacccctgaggtcacatgcgtggtggtggacgtgagccacgaagaccctgaggtcaagttcaactggtacgtggacggcgtggaggtgcataatgccaagacaaagccgtgcgaggagcagtacggcagcacgtaccgttgcgtcagcgtcctcaccgtcctgcaccaggactggctgaatggcaaggagtacaagtgcaaggtgtccaacaaagccctcccagcccccatcgagaaaaccatctccaaagccaaagggcagccccgagaaccacaggtgtacaccctgcccccatcccgggaggagatgaccaagaaccaggtcagcctgacctgcctggtcaaaggcttctatcccagcgacatcgccgtggagtgggagagcaatgggcagccggagaacaactacaagaccacgcctcccgtgctggactccgacggctccttcttcctctatagcaagctcaccgtggacaagagcaggtggcagcaggggaacgtcttctcatgctccgtgatgcatgaggctctgcacaaccactacacgcagaagagcctctccctgtctcccgggggaggcggtggatcctctccaggtcaaggtactcaatccgaaaactcctgcacccacttcccgggtaacctgccgaacatgctgcgtgacctgcgtgacgctttctcccgtgttaaaaccttcttccagatgaaaggccagctggacaacctgctgctgaaagaatccctgctggaagacttcaaaggttacctgggttgtcaggctctgtccgaaatgatccagttctacctggaagaagttatgccgcaggctgaaaaccaggacccggacatcaaagctcacgttaactccctgggtgaaaacctgaaaaccctgcgtctgcgtctgcgccgttgccatcgattcctgccgtgcgaaaacggtggcggttctggtggtaaatccaaagctgttgaacaggttaaaaacgctttcaacaaactgcaggaaaaaggtatctacaaagctatgtccgaattcgacatcttcatcaactacatcgaagcttacatgaccatgaaaatccgtaactag

SEQ ID NO: 470 - DNA, 693 bp, synthetic construct; identical to SEQ ID NO: 464
  misc_feature 1..693: note = Synthetic
  source 1..693: mol_type = other DNA

SEQ ID NO: 471 - DNA, 1932 bp, synthetic construct
  misc_feature 1..1932: note = Synthetic
  source 1..1932: mol_type = other DNA
atggacatgagggtgcccgctcagctcctggggctcctgctgctgtggctgagaggtgcgcgctgtcaggtgcagctggtgcagtctggggctgaggtgaagaagcctggggcctcagtgaaggtgtcctgcaaggcttctggatacaccttcaacggctactatatccactgggtgcgacaggcccctggacaagggcttgagtggatgggatggctcaacccaaacagtggtggcgcaaactatgcacagaagtttcagggctgggtcaccatgaccagggacacgtccatcagcacagcctacatggagctgagcaggctgacatctgacgacacggccgtgtattactgtgcgagagatcagaggaagaccacggtgactccctttgagtactggggccagggaaccctggtcaccgtgtcctcagcctccaccaagggcccatcggtcttccccctggcaccctcctccaagagcacctctgggggcacagcggccctgggctgcctggtcaaggactacttccccgaaccggtgacggtgtcgtggaactcaggcgccctgaccagcggcgtgcacaccttcccggctgtcctacagtcctcaggactctactccctcagcagcgtggtgaccgtgccctccagcagcttgggcacccagacctacatctgcaacgtgaatcacaagcccagcaacaccaaggtggacaagaaagttgagcccaaatcttgtgacaaaactcacacatgcccaccgtgcccagcacctgaactcctggggggaccgtcagtcttcctcttccccccaaaacccaaggacaccctcatgatctcccggacccctgaggtcacatgcgtggtggtggacgtgagccacgaagaccctgaggtcaagttcaactggtacgtggacggcgtggaggtgcataatgccaagacaaagccgtgcgaggagcagtacggcagcacgtaccgttgcgtcagcgtcctcaccgtcctgcaccaggactggctgaatggcaaggagtacaagtgcaaggtgtccaacaaagccctcccagcccccatcgagaaaaccatctccaaagccaaagggcagccccgagaaccacaggtgtacaccctgcccccatcccgggaggagatgaccaagaaccaggtcagcctgacctgcctggtcaaaggcttctatcccagcgacatcgccgtggagtgggagagcaatgggcagccggagaacaactacaagaccacgcctcccgtgctggactccgacggctccttcttcctctatagcaagctcaccgtggacaagagcaggtggcagcaggggaacgtcttctcatgctccgtgatgcatgaggctctgcacaaccactacacgcagaagagcctctccctgtctcccgggggaggcggtggatcctctccaggtcaaggtactcaatccgaaaactcctgcacccacttcccgggtaacctgccgaacatgctgcgtgacctgcgtgacgctttctcccgtgttaaaaccttcttccggatgaaagaccagctggacaacctgctgctgaaagaatccctgctggaagacttcaaaggttacctgggttgtcaggctctgtccgaaatgatccagttctacctggaagaagttatgccgcaggctgaaaaccaggacccggacatcaaagctcacgttaactccctgggtgaaaacctgaaaaccctgcgtctgcgtctgcgccgttgccatcgattcctgccgtgcgaaaacggtggcggttctggtggtaaatccaaagctgttgaacaggttaaaaacgctttcaacaaactgcaggaaaaaggtatctacaaagctatgtccgaattcgacatcttcatcaactacatcgaagcttacatgaccatgaaaatccgtaactag

SEQ ID NO: 472 - DNA, 693 bp, synthetic construct; identical to SEQ ID NO: 464
  misc_feature 1..693: note = Synthetic
  source 1..693: mol_type = other DNA

SEQ ID NO: 473 - DNA, 1932 bp, synthetic construct
  misc_feature 1..1932: note = Synthetic
  source 1..1932: mol_type = other DNA
atggacatgagggtgcccgctcagctcctggggctcctgctgctgtggctgagaggtgcgcgctgtcaggtgcagctggtgcagtctggggctgaggtgaagaagcctggggcctcagtgaaggtgtcctgcaaggcttctggatacaccttcaacggctactatatccactgggtgcgacaggcccctggacaagggcttgagtggatgggatggctcaacccaaacagtggtggcgcaaactatgcacagaagtttcagggctgggtcaccatgaccagggacacgtccatcagcacagcctacatggagctgagcaggctgacatctgacgacacggccgtgtattactgtgcgagagatcagaggaagaccacggtgactccctttgagtactggggccagggaaccctggtcaccgtgtcctcagcctccaccaagggcccatcggtcttccccctggcaccctcctccaagagcacctctgggggcacagcggccctgggctgcctggtcaaggactacttccccgaaccggtgacggtgtcgtggaactcaggcgccctgaccagcggcgtgcacaccttcccggctgtcctacagtcctcaggactctactccctcagcagcgtggtgaccgtgccctccagcagcttgggcacccagacctacatctgcaacgtgaatcacaagcccagcaacaccaaggtggacaagaaagttgagcccaaatcttgtgacaaaactcacacatgcccaccgtgcccagcacctgaactcctggggggaccgtcagtcttcctcttccccccaaaacccaaggacaccctcatgatctcccggacccctgaggtcacatgcgtggtggtggacgtgagccacgaagaccctgaggtcaagttcaactggtacgtggacggcgtggaggtgcataatgccaagacaaagccgtgcgaggagcagtacggcagcacgtaccgttgcgtcagcgtcctcaccgtcctgcaccaggactggctgaatggcaaggagtacaagtgcaaggtgtccaacaaagccctcccagcccccatcgagaaaaccatctccaaagccaaagggcagccccgagaaccacaggtgtacaccctgcccccatcccgggaggagatgaccaagaaccaggtcagcctgacctgcctggtcaaaggcttctatcccagcgacatcgccgtggagtgggagagcaatgggcagccggagaacaactacaagaccacgcctcccgtgctggactccgacggctccttcttcctctatagcaagctcaccgtggacaagagcaggtggcagcaggggaacgtcttctcatgctccgtgatgcatgaggctctgcacaaccactacacgcagaagagcctctccctgtctcccgggggaggcggtggatcctctccaggtcaaggtactcaatccgaaaactcctgcacccacttcccgggtaacctgccgaacatgctgcgtgacctgcgtgacgctttctcccgtgttaaaaccttcttccagatgaaagaccagctggacaacaagctgctgaaagaatccctgctggaagacttcaaaggttacctgggttgtcaggctctgtccgaaatgatccagttctacctggaagaagttatgccgcaggctgaaaaccaggacccggacatcaaagctcacgttaactccctgggtgaaaacctgaaaaccctgcgtctgcgtctgcgccgttgccatcgattcctgccgtgcgaaaacggtggcggttctggtggtaaatccaaagctgttgaacaggttaaaaacgctttcaacaaactgcaggaaaaaggtatctacaaagctatgtccgaattcgacatcttcatcaactacatcgaagcttacatgaccatgaaaatccgtaactag

SEQ ID NO: 474 - DNA, 693 bp, synthetic construct; identical to SEQ ID NO: 464
  misc_feature 1..693: note = Synthetic
  source 1..693: mol_type = other DNA

SEQ ID NO: 475 - DNA, 1932 bp, synthetic construct
  misc_feature 1..1932: note = Synthetic
  source 1..1932: mol_type = other DNA
atggacatgagggtgcccgctcagctcctggggctcctgctgctgtggctgagaggtgcgcgctgtcaggtgcagctggtgcagtctggggctgaggtgaagaagcctggggcctcagtgaaggtgtcctgcaaggcttctggatacaccttcaacggctactatatccactgggtgcgacaggcccctggacaagggcttgagtggatgggatggctcaacccaaacagtggtggcgcaaactatgcacagaagtttcagggctgggtcaccatgaccagggacacgtccatcagcacagcctacatggagctgagcaggctgacatctgacgacacggccgtgtattactgtgcgagagatcagaggaagaccacggtgactccctttgagtactggggccagggaaccctggtcaccgtgtcctcagcctccaccaagggcccatcggtcttccccctggcaccctcctccaagagcacctctgggggcacagcggccctgggctgcctggtcaaggactacttccccgaaccggtgacggtgtcgtggaactcaggcgccctgaccagcggcgtgcacaccttcccggctgtcctacagtcctcaggactctactccctcagcagcgtggtgaccgtgccctccagcagcttgggcacccagacctacatctgcaacgtgaatcacaagcccagcaacaccaaggtggacaagaaagttgagcccaaatcttgtgacaaaactcacacatgcccaccgtgcccagcacctgaactcctggggggaccgtcagtcttcctcttccccccaaaacccaaggacaccctcatgatctcccggacccctgaggtcacatgcgtggtggtggacgtgagccacgaagaccctgaggtcaagttcaactggtacgtggacggcgtggaggtgcataatgccaagacaaagccgtgcgaggagcagtacggcagcacgtaccgttgcgtcagcgtcctcaccgtcctgcaccaggactggctgaatggcaaggagtacaagtgcaaggtgtccaacaaagccctcccagcccccatcgagaaaaccatctccaaagccaaagggcagccccgagaaccacaggtgtacaccctgcccccatcccgggaggagatgaccaagaaccaggtcagcctgacctgcctggtcaaaggcttctatcccagcgacatcgccgtggagtgggagagcaatgggcagccggagaacaactacaagaccacgcctcccgtgctggactccgacggctccttcttcctctatagcaagctcaccgtggacaagagcaggtggcagcaggggaacgtcttctcatgctccgtgatgcatgaggctctgcacaaccactacacgcagaagagcctctccctgtctcccgggggaggcggtggatcctctccaggtcaaggtactcaatccgaaaactcctgcacccacttcccgggtaacctgccgaacatgctgcgtgacctgcgtgacgctttctcccgtgttgacaccttcttccagatgaaagaccagctggacaacctgctgctgaaagaatccctgctggaagacttcaaaggttacctgggttgtcaggctctgtccgaaatgatccagttctacctggaagaagttatgccgcaggctgaaaaccaggacccggacatcaaagctcacgttaactccctgggtgaaaacctgaaaaccctgcgtctgcgtctgcgccgttgccatcgattcctgccgtgcgaaaacggtggcggttctggtggtaaatccaaagctgttgaacaggttaaaaacgctttcaacaaactgcaggaaaaaggtatctacaaagctatgtccgaattcgacatcttcatcaactacatcgaagcttacatgaccatgaaaatccgtaactag

SEQ ID NO: 476 - DNA, 693 bp, synthetic construct; identical to SEQ ID NO: 464
  misc_feature 1..693: note = Synthetic
  source 1..693: mol_type = other DNA

SEQ ID NO: 477 - DNA, 1932 bp, synthetic construct
  misc_feature 1..1932: note = Synthetic
  source 1..1932: mol_type = other DNA
atggacatgagggtgcccgctcagctcctggggctcctgctgctgtggctgagaggtgcgcgctgtcaggtgcagctggtgcagtctggggctgaggtgaagaagcctggggcctcagtgaaggtgtcctgcaaggcttctggatacaccttcaacggctactatatccactgggtgcgacaggcccctggacaagggcttgagtggatgggatggctcaacccaaacagtggtggcgcaaactatgcacagaagtttcagggctgggtcaccatgaccagggacacgtccatcagcacagcctacatggagctgagcaggctgacatctgacgacacggccgtgtattactgtgcgagagatcagaggaagaccacggtgactccctttgagtactggggccagggaaccctggtcaccgtgtcctcagcctccaccaagggcccatcggtcttccccctggcaccctcctccaagagcacctctgggggcacagcggccctgggctgcctggtcaaggactacttccccgaaccggtgacggtgtcgtggaactcaggcgccctgaccagcggcgtgcacaccttcccggctgtcctacagtcctcaggactctactccctcagcagcgtggtgaccgtgccctccagcagcttgggcacccagacctacatctgcaacgtgaatcacaagcccagcaacaccaaggtggacaagaaagttgagcccaaatcttgtgacaaaactcacacatgcccaccgtgcccagcacctgaactcctggggggaccgtcagtcttcctcttccccccaaaacccaaggacaccctcatgatctcccggacccctgaggtcacatgcgtggtggtggacgtgagccacgaagaccctgaggtcaagttcaactggtacgtggacggcgtggaggtgcataatgccaagacaaagccgtgcgaggagcagtacggcagcacgtaccgttgcgtcagcgtcctcaccgtcctgcaccaggactggctgaatggcaaggagtacaagtgcaaggtgtccaacaaagccctcccagcccccatcgagaaaaccatctccaaagccaaagggcagccccgagaaccacaggtgtacaccctgcccccatcccgggaggagatgaccaagaaccaggtcagcctgacctgcctggtcaaaggcttctatcccagcgacatcgccgtggagtgggagagcaatgggcagccggagaacaactacaagaccacgcctcccgtgctggactccgacggctccttcttcctctatagcaagctcaccgtggacaagagcaggtggcagcaggggaacgtcttctcatgctccgtgatgcatgaggctctgcacaaccactacacgcagaagagcctctccctgtctcccgggggaggcggtggatcctctccaggtcaaggtactcaatccgaaaactcctgcacccacttcccgggtaacctgccgaacatgctgcgtgacctgcgtgacgctttctcccgtgttaaaaccttcttcgagatgaaagaccagctggacaacctgctgctgaaagaatccctgctggaagacttcaaaggttacctgggttgtcaggctctgtccgaaatgatccagttctacctggaagaagttatgccgcaggctgaaaaccaggacccggacatcaaagctcacgttaactccctgggtgaaaacctgaaaaccctgcgtctgcgtctgcgccgttgccatcgattcctgccgtgcgaaaacggtggcggttctggtggtaaatccaaagctgttgaacaggttaaaaacgctttcaacaaactgcaggaaaaaggtatctacaaagctatgtccgaattcgacatcttcatcaactacatcgaagcttacatgaccatgaaaatccgtaactag

SEQ ID NO: 478 - DNA, 693 bp, synthetic construct; identical to SEQ ID NO: 464
  misc_feature 1..693: note = Synthetic
  source 1..693: mol_type = other DNA

SEQ ID NO: 479 - DNA, 1935 bp, synthetic construct
  misc_feature 1..1935: note = Synthetic
  source 1..1935: mol_type = other DNA
atggacatgagggtgcccgctcagctcctggggctcctgctgctgtggctgagaggtgcgcgctgtcaggtgcaactggtgcagtctggggctgaggtgacgaagcctggggcctcagtgaaggtgtcctgcaaggcttctggatacaccttcaccagatatgatatcaactgggtgcgacaggccactggacaagggcttgagtggatgggatggatgaaccctaacagtggtaattcaggctctgtacagaaattccggggcagagtcaccatgaccagggacacctccatcaccacagtctatatggaactgagcagcctgagatctgatgacacggccgtgtattactgtgcgagaggaggaattagcagcagctggcactgggcttttgatatctggggccaagggacaatggtcaccgtgtcttcagcctccaccaagggcccatcggtcttccccctggcaccctcctccaagagcacctctgggggcacagcggccctgggctgcctggtcaaggactacttccccgaaccggtgacggtgtcgtggaactcaggcgccctgaccagcggcgtgcacaccttcccggctgtcctacagtcctcaggactctactccctcagcagcgtggtgaccgtgccctccagcagcttgggcacccagacctacatctgcaacgtgaatcacaagcccagcaacaccaaggtggacaagaaagttgagcccaaatcttgtgacaaaactcacacatgcccaccgtgcccagcacctgaactcctggggggaccgtcagtcttcctcttccccccaaaacccaaggacaccctcatgatctcccggacccctgaggtcacatgcgtggtggtggacgtgagccacgaagaccctgaggtcaagttcaactggtacgtggacggcgtggaggtgcataatgccaagacaaagccgtgcgaggagcagtacggcagcacgtaccgttgcgtcagcgtcctcaccgtcctgcaccaggactggctgaatggcaaggagtacaagtgcaaggtgtccaacaaagccctcccagcccccatcgagaaaaccatctccaaagccaaagggcagccccgagaaccacaggtgtacaccctgcccccatcccgggaggagatgaccaagaaccaggtcagcctgacctgcctggtcaaaggcttctatcccagcgacatcgccgtggagtgggagagcaatgggcagccggagaacaactacaagaccacgcctcccgtgctggactccgacggctccttcttcctctatagcaagctcaccgtggacaagagcaggtggcagcaggggaacgtcttctcatgctccgtgatgcatgaggctctgcacaaccactacacgcagaagagcctctccctgtctcccgggggaggcggtggatcctctccaggtcaaggtactcaatccgaaaactcctgcacccacttcccgggtaacctgccgaacatgctgcgtgacctgcttgacgctttctcccgtgttaaaaccttcttccagatgaaagaccagctggacaacctgctgctgaaagaatccctgctggaagacttcaaaggttacctgggttgtcaggctctgtccgaaatgatccagttctacctggaagaagttatgccgcaggctgaaaaccaggacccggacatcaaagctcacgttaactccctgggtgaaaacctgaaaaccctgcgtctgcgtctgcgccgttgccatcgattcctgccgtgcgaaaacggtggcggttctggtggtaaatccaaagctgttgaacaggttaaaaacgctttcaacaaactgcaggaaaaaggtatctacaaagctatgtccgaattcgacatcttcatcaactacatcgaagcttacatgaccatgaaaatccgtaactag

SEQ ID NO: 480 - DNA, 711 bp, synthetic construct
  misc_feature 1..711: note = Synthetic
  source 1..711: mol_type = other DNA
atggacatgagggtgcccgctcagctcctggggctcctgctgctgtggctgagaggtgcgcgctgtgacatccagatgacccagtctccatcctccctgtctgcatctgtaggagacagagtcaccatcacttgccaggcgagtcaggacattaacaaccatttaaattggtatcagcagaaaccggggaaagcccctaagctcctgatctacggtgcatacactttggaaacaggggtcccatcaaggttcagtggaagtggctctgggacagattttactttcaccatcagcagcctgcagcctgaagatattgctacatattactgtcaacagtatgataagctcccgctcactttcggcggagggaccaaggtggagatcaaacgaacggtggctgcaccatctgtcttcatcttcccgccatctgatgagcagttgaaatctggaactgcctctgttgtgtgcctgctgaataacttctatcccagagaggccaaagtacagtggaaggtggataacgccctccaatcgggtaactcccaggagagtgtcacagagcaggacagcaaggacagcacctacagcctcagcagcaccctgacgctgagcaaagcagactacgagaaacacaaagtctacgcctgcgaagtcacccatcagggcctgagctcgcccgtcacaaagagcttcaacaggggagagtgttag

SEQ ID NO: 481 - DNA, 1935 bp, synthetic construct
  misc_feature 1..1935: note = Synthetic
  source 1..1935: mol_type = other DNA
atggacatgagggtgcccgctcagctcctggggctcctgctgctgtggctgagaggtgcgcgctgtcaggtgcaactggtgcagtctggggctgaggtgacgaagcctggggcctcagtgaaggtgtcctgcaaggcttctggatacaccttcaccagatatgatatcaactgggtgcgacaggccactggacaagggcttgagtggatgggatggatgaaccctaacagtggtaattcaggctctgtacagaaattccggggcagagtcaccatgaccagggacacctccatcaccacagtctatatggaactgagcagcctgagatctgatgacacggccgtgtattactgtgcgagaggaggaattagcagcagctggcactgggcttttgatatctggggccaagggacaatggtcaccgtgtcttcagcctccaccaagggcccatcggtcttccccctggcaccctcctccaagagcacctctgggggcacagcggccctgggctgcctggtcaaggactacttccccgaaccggtgacggtgtcgtggaactcaggcgccctgaccagcggcgtgcacaccttcccggctgtcctacagtcctcaggactctactccctcagcagcgtggtgaccgtgccctccagcagcttgggcacccagacctacatctgcaacgtgaatcacaagcccagcaacaccaaggtggacaagaaagttgagcccaaatcttgtgacaaaactcacacatgcccaccgtgcccagcacctgaactcctggggggaccgtcagtcttcctcttccccccaaaacccaaggacaccctcatgatctcccggacccctgaggtcacatgcgtggtggtggacgtgagccacgaagaccctgaggtcaagttcaactggtacgtggacggcgtggaggtgcataatgccaagacaaagccgtgcgaggagcagtacggcagcacgtaccgttgcgtcagcgtcctcaccgtcctgcaccaggactggctgaatggcaaggagtacaagtgcaaggtgtccaacaaagccctcccagcccccatcgagaaaaccatctccaaagccaaagggcagccccgagaaccacaggtgtacaccctgcccccatcccgggaggagatgaccaagaaccaggtcagcctgacctgcctggtcaaaggcttctatcccagcgacatcgccgtggagtgggagagcaatgggcagccggagaacaactacaagaccacgcctcccgtgctggactccgacggctccttcttcctctatagcaagctcaccgtggacaagagcaggtggcagcaggggaacgtcttctcatgctccgtgatgcatgaggctctgcacaaccactacacgcagaagagcctctccctgtctcccgggggaggcggtggatcctctccaggtcaaggtactcaatccgaaaactcctgcacccacttcccgggtaacctgccgaacatgctgcgtgacctgcgtgacgctttctcccgtgttaaaaccttcttccagatgaaagaccagctggacaacctgctgctgaaagaatccctgctggaagacttcaaaggttacctgggttgtcaggctctgtccgaaatgatccagttctacctggaagaagttatgccgcaggctgaaaaccaggacccggacatcaaagctcacgttaactccctgggtgaaaacctgaaaaccctgcgtctgcgtctgcgccgttgccatcgattcctgccgtgcgaaaacggtggcggttctggtggtaaatccaaagctgttgaacaggttaaaaacgctttcaacaaactgcaggaaaaaggtatctacttagctatgtccgaattcgacatcttcatcaactacatcgaagcttacatgaccatgaaaatccgtaactag

SEQ ID NO: 482 - DNA, 711 bp, synthetic construct; identical to SEQ ID NO: 480
  misc_feature 1..711: note = Synthetic
  source 1..711: mol_type = other DNA

SEQ ID NO: 483 - DNA, 1935 bp, synthetic construct
  misc_feature 1..1935: note = Synthetic
  source 1..1935: mol_type = other DNA
atggacatgagggtgcccgctcagctcctggggctcctgctgctgtggctgagaggtgcgcgctgtcaggtgcaactggtgcagtctggggctgaggtgacgaagcctggggcctcagtgaaggtgtcctgcaaggcttctggatacaccttcaccagatatgatatcaactgggtgcgacaggccactggacaagggcttgagtggatgggatggatgaaccctaacagtggtaattcaggctctgtacagaaattccggggcagagtcaccatgaccagggacacctccatcaccacagtctatatggaactgagcagcctgagatctgatgacacggccgtgtattactgtgcgagaggaggaattagcagcagctggcactgggcttttgatatctggggccaagggacaatggtcaccgtgtcttcagcctccaccaagggcccatcggtcttccccctggcaccctcctccaagagcacctctgggggcacagcggccctgggctgcctggtcaaggactacttccccgaaccggtgacggtgtcgtggaactcaggcgccctgaccagcggcgtgcacaccttcccggctgtcctacagtcctcaggactctactccctcagcagcgtggtgaccgtgccctccagcagcttgggcacccagacctacatctgcaacgtgaatcacaagcccagcaacaccaaggtggacaagaaagttgagcccaaatcttgtgacaaaactcacacatgcccaccgtgcccagcacctgaactcctggggggaccgtcagtcttcctcttccccccaaaacccaaggacaccctcatgatctcccggacccctgaggtcacatgcgtggtggtggacgtgagccacgaagaccctgaggtcaagttcaactggtacgtggacggcgtggaggtgcataatgccaagacaaagccgtgcgaggagcagtacggcagcacgtaccgttgcgtcagcgtcctcaccgtcctgcaccaggactggctgaatggcaaggagtacaagtgcaaggtgtccaacaaagccctcccagcccccatcgagaaaaccatctccaaagccaaagggcagccccgagaaccacaggtgtacaccctgcccccatcccgggaggagatgaccaagaaccaggtcagcctgacctgcctggtcaaaggcttctatcccagcgacatcgccgtggagtgggagagcaatgggcagccggagaacaactacaagaccacgcctcccgtgctggactccgacggctccttcttcctctatagcaagctcaccgtggacaagagcaggtggcagcaggggaacgtcttctcatgctccgtgatgcatgaggctctgcacaaccactacacgcagaagagcctctccctgtctcccgggggaggcggtggatcctctccaggtcaaggtactcaatccgaaaactcctgcacccacttcccgggtaacctgccgaacatgctgcgtgacctgcgtgacgctttctcccgtgttaaaaccttcttccagatgaaagaccagctggacaacctgctgctgaaagaatccctgctggaagacttcaaaggttacctgggttgtcaggctctgtccgaaatgatccagttctacctggaagaagttatgccgcaggctgaaaaccaggacccggacatcaaagctcacgttaactccctgggtgaaaacctgaaaaccctgcgtctgcgtctgcgccgttgccatcgattcctgccgtgcgaaaacggtggcggttctggtggtaaatccaaagctgttgaacaggttaaaaacgctttcaacaaactgcaggaaaaaggtatctacgacgctatgtccgaattcgacatcttcatcaactacatcgaagcttacatgaccatgaaaatccgtaactag

SEQ ID NO: 484 - DNA, 711 bp, synthetic construct; identical to SEQ ID NO: 480
  misc_feature 1..711: note = Synthetic
  source 1..711: mol_type = other DNA

SEQ ID NO: 485 - DNA, 1935 bp, synthetic construct
  misc_feature 1..1935: note = Synthetic
  source 1..1935: mol_type = other DNA
atggacatgagggtgcccgctcagctcctggggctcctgctgctgtggctgagaggtgcgcgctgtcaggtgcaactggtgcagtctggggctgaggtgacgaagcctggggcctcagtgaaggtgtcctgcaaggcttctggatacaccttcaccagatatgatatcaactgggtgcgacaggccactggacaagggcttgagtggatgggatggatgaaccctaacagtggtaattcaggctctgtacagaaattccggggcagagtcaccatgaccagggacacctccatcaccacagtctatatggaactgagcagcctgagatctgatgacacggccgtgtattactgtgcgagaggaggaattagcagcagctggcactgggcttttgatatctggggccaagggacaatggtcaccgtgtcttcagcctccaccaagggcccatcggtcttccccctggcaccctcctccaagagcacctctgggggcacagcggccctgggctgcctggtcaaggactacttccccgaaccggtgacggtgtcgtggaactcaggcgccctgaccagcggcgtgcacaccttcccggctgtcctacagtcctcaggactctactccctcagcagcgtggtgaccgtgccctccagcagcttgggcacccagacctacatctgcaacgtgaatcacaagcccagcaacaccaaggtggacaagaaagttgagcccaaatcttgtgacaaaactcacacatgcccaccgtgcccagcacctgaactcctggggggaccgtcagtcttcctcttccccccaaaacccaaggacaccctcatgatctcccggacccctgaggtcacatgcgtggtggtggacgtgagccacgaagaccctgaggtcaagttcaactggtacgtggacggcgtggaggtgcataatgccaagacaaagccgtgcgaggagcagtacggcagcacgtaccgttgcgtcagcgtcctcaccgtcctgcaccaggactggctgaatggcaaggagtacaagtgcaaggtgtccaacaaagccctcccagcccccatcgagaaaaccatctccaaagccaaagggcagccccgagaaccacaggtgtacaccctgcccccatcccgggaggagatgaccaagaaccaggtcagcctgacctgcctggtcaaaggcttctatcccagcgacatcgccgtggagtgggagagcaatgggcagccggagaacaactacaagaccacgcctcccgtgctggactccgacggctccttcttcctctatagcaagctcaccgtggacaagagcaggtggcagcaggggaacgtcttctcatgctccgtgatgcatgaggctctgcacaaccactacacgcagaagagcctctccctgtctcccgggggaggcggtggatcctctccaggtcaaggtactcaatccgaaaactcctgcacccacttcccgggtaacctgccgaacatgctgcgtgacctgcgtgacgctttctcccgtgttaaaaccttcttccagatgaaaggccagctggacaacctgctgctgaaagaatccctgctggaagacttcaaaggttacctgggttgtcaggctctgtccgaaatgatccagttctacctggaagaagttatgccgcaggctgaaaaccaggacccggacatcaaagctcacgttaactccctgggtgaaaacctgaaaaccctgcgtctgcgtctgcgccgttgccatcgattcctgccgtgcgaaaacggtggcggttctggtggtaaatccaaagctgttgaacaggttaaaaacgctttcaacaaactgcaggaaaaaggtatctacaaagctatgtccgaattcgacatcttcatcaactacatcgaagcttacatgaccatgaaaatccgtaactag

SEQ ID NO: 486 - DNA, 711 bp, synthetic construct; identical to SEQ ID NO: 480
  misc_feature 1..711: note = Synthetic
  source 1..711: mol_type = other DNA

SEQ ID NO: 487 - DNA, 1935 bp, synthetic construct
  misc_feature 1..1935: note = Synthetic
  source 1..1935: mol_type = other DNA
atggacatgagggtgcccgctcagctcctggggctcctgctgctgtggctgagaggtgcgcgctgtcaggtgcaactggtgcagtctggggctgaggtgacgaagcctggggcctcagtgaaggtgtcctgcaaggcttctggatacaccttcaccagatatgatatcaactgggtgcgacaggccactggacaagggcttgagtggatgggatggatgaaccctaacagtggtaattcaggctctgtacagaaattccggggcagagtcaccatgaccagggacacctccatcaccacagtctatatggaactgagcagcctgagatctgatgacacggccgtgtattactgtgcgagaggaggaattagcagcagctggcactgggcttttgatatctggggccaagggacaatggtcaccgtgtcttcagcctccaccaagggcccatcggtcttccccctggcaccctcctccaagagcacctctgggggcacagcggccctgggctgcctggtcaaggactacttccccgaaccggtgacggtgtcgtggaactcaggcgccctgaccagcggcgtgcacaccttcccggctgtcctacagtcctcaggactctactccctcagcagcgtggtgaccgtgccctccagcagcttgggcacccagacctacatctgcaacgtgaatcacaagcccagcaacaccaaggtggacaagaaagttgagcccaaatcttgtgacaaaactcacacatgcccaccgtgcccagcacctgaactcctggggggaccgtcagtcttcctcttccccccaaaacccaaggacaccctcatgatctcccggacccctgaggtcacatgcgtggtggtggacgtgagccacgaagaccctgaggtcaagttcaactggtacgtggacggcgtggaggtgcataatgccaagacaaagccgtgcgaggagcagtacggcagcacgtaccgttgcgtcagcgtcctcaccgtcctgcaccaggactggctgaatggcaaggagtacaagtgcaaggtgtccaacaaagccctcccagcccccatcgagaaaaccatctccaaagccaaagggcagccccgagaaccacaggtgtacaccctgcccccatcccgggaggagatgaccaagaaccaggtcagcctgacctgcctggtcaaaggcttctatcccagcgacatcgccgtggagtgggagagcaatgggcagccggagaacaactacaagaccacgcctcccgtgctggactccgacggctccttcttcctctatagcaagctcaccgtggacaagagcaggtggcagcaggggaacgtcttctcatgctccgtgatgcatgaggctctgcacaaccactacacgcagaagagcctctccctgtctcccgggggaggcggtggatcctctccaggtcaaggtactcaatccgaaaactcctgcacccacttcccgggtaacctgccgaacatgctgcgtgacctgcgtgacgctttctcccgtgttaaaaccttcttccggatgaaagaccagctggacaacctgctgctgaaagaatccctgctggaagacttcaaaggttacctgggttgtcaggctctgtccgaaatgatccagttctacctggaagaagttatgccgcaggctgaaaaccaggacccggacatcaaagctcacgttaactccctgggtgaaaacctgaaaaccctgcgtctgcgtctgcgccgttgccatcgattcctgccgtgcgaaaacggtggcggttctggtggtaaatccaaagctgttgaacaggttaaaaacgctttcaacaaactgcaggaaaaaggtatctacaaagctatgtccgaattcgacatcttcatcaactacatcgaagcttacatgaccatgaaaatccgtaactag

SEQ ID NO: 488 - DNA, 711 bp, synthetic construct; identical to SEQ ID NO: 480
  misc_feature 1..711: note = Synthetic
  source 1..711: mol_type = other DNA

SEQ ID NO: 489 - DNA, 1935 bp, synthetic construct
  misc_feature 1..1935: note = Synthetic
  source 1..1935: mol_type = other DNA
atggacatgagggtgcccgctcagctcctggggctcctgctgctgtggctgagaggtgcgcgctgtcaggtgcaactggtgcagtctggggctgaggtgacgaagcctggggcctcagtgaaggtgtcctgcaaggcttctggatacaccttcaccagatatgatatcaactgggtgcgacaggccactggacaagggcttgagtggatgggatggatgaaccctaacagtggtaattcaggctctgtacagaaattccggggcagagtcaccatgaccagggacacctccatcaccacagtctatatggaactgagcagcctgagatctgatgacacggccgtgtattactgtgcgagaggaggaattagcagcagctggcactgggcttttgatatctggggccaagggacaatggtcaccgtgtcttcagcctccaccaagggcccatcggtcttccccctggcaccctcctccaagagcacctctgggggcacagcggccctgggctgcctggtcaaggactacttccccgaaccggtgacggtgtcgtggaactcaggcgccctgaccagcggcgtgcacaccttcccggctgtcctacagtcctcaggactctactccctcagcagcgtggtgaccgtgccctccagcagcttgggcacccagacctacatctgcaacgtgaatcacaagcccagcaacaccaaggtggacaagaaagttgagcccaaatcttgtgacaaaactcacacatgcccaccgtgcccagcacctgaactcctggggggaccgtcagtcttcctcttccccccaaaacccaaggacaccctcatgatctcccggacccctgaggtcacatgcgtggtggtggacgtgagccacgaagaccctgaggtcaagttcaactggtacgtggacggcgtggaggtgcataatgccaagacaaagccgtgcgaggagcagtacggcagcacgtaccgttgcgtcagcgtcctcaccgtcctgcaccaggactggctgaatggcaaggagtacaagtgcaaggtgtccaacaaagccctcccagcccccatcgagaaaaccatctccaaagccaaagggcagccccgagaaccacaggtgtacaccctgcccccatcccgggaggagatgaccaagaaccaggtcagcctgacctgcctggtcaaaggcttctatcccagcgacatcgccgtggagtgggagagcaatgggcagccggagaacaactacaagaccacgcctcccgtgctggactccgacggctccttcttcctctatagcaagctcaccgtggacaagagcaggtggcagcaggggaacgtcttctcatgctccgtgatgcatgaggctctgcacaaccactacacgcagaagagcctctccctgtctcccgggggaggcggtggatcctctccaggtcaaggtactcaatccgaaaactcctgcacccacttcccgggtaacctgccgaacatgctgcgtgacctgcgtgacgctttctcccgtgttaaaaccttcttccagatgaaagaccagctggacaacaagctgctgaaagaatccctgctggaagacttcaaaggttacctgggttgtcaggctctgtccgaaatgatccagttctacctggaagaagttatgccgcaggctgaaaaccaggacccggacatcaaagctcacgttaactccctgggtgaaaacctgaaaaccctgcgtctgcgtctgcgccgttgccatcgattcctgccgtgcgaaaacggtggcggttctggtggtaaatccaaagctgttgaacaggttaaaaacgctttcaacaaactgcaggaaaaaggtatctacaaagctatgtccgaattcgacatcttcatcaactacatcgaagcttacatgaccatgaaaatccgtaactag

SEQ ID NO: 490 - DNA, 711 bp, synthetic construct; identical to SEQ ID NO: 480
  misc_feature 1..711: note = Synthetic
  source 1..711: mol_type = other DNA

SEQ ID NO: 491 - DNA, 1935 bp, synthetic construct
  misc_feature 1..1935: note = Synthetic
  source 1..1935: mol_type = other DNA
atggacatgagggtgcccgctcagctcctggggctcctgctgctgtggctgagaggtgcgcgctgtcaggtgcaactggtgcagtctggggctgaggtgacgaagcctggggcctcagtgaaggtgtcctgcaaggcttctggatacaccttcaccagatatgatatcaactgggtgcgacaggccactggacaagggcttgagtggatgggatggatgaaccctaacagtggtaattcaggctctgtacagaaattccggggcagagtcaccatgaccagggacacctccatcaccacagtctatatggaactgagcagcctgagatctgatgacacggccgtgtattactgtgcgagaggaggaattagcagcagctggcactgggcttttgatatctggggccaagggacaatggtcaccgtgtcttcagcctccaccaagggcccatcggtcttccccctggcaccctcctccaagagcacctctgggggcacagcggccctgggctgcctggtcaaggactacttccccgaaccggtgacggtgtcgtggaactcaggcgccctgaccagcggcgtgcacaccttcccggctgtcctacagtcctcaggactctactccctcagcagcgtggtgaccgtgccctccagcagcttgggcacccagacctacatctgcaacgtgaatcacaagcccagcaacaccaaggtggacaagaaagttgagcccaaatcttgtgacaaaactcacacatgcccaccgtgcccagcacctgaactcctggggggaccgtcagtcttcctcttccccccaaaacccaaggacaccctcatgatctcccggacccctgaggtcacatgcgtggtggtggacgtgagccacgaagaccctgaggtcaagttcaactggtacgtggacggcgtggaggtgcataatgccaagacaaagccgtgcgaggagcagtacggcagcacgtaccgttgcgtcagcgtcctcaccgtcctgcaccaggactggctgaatggcaaggagtacaagtgcaaggtgtccaacaaagccctcccagcccccatcgagaaaaccatctccaaagccaaagggcagccccgagaaccacaggtgtacaccctgcccccatcccgggaggagatgaccaagaaccaggtcagcctgacctgcctggtcaaaggcttctatcccagcgacatcgccgtggagtgggagagcaatgggcagccggagaacaactacaagaccacgcctcccgtgctggactccgacggctccttcttcctctatagcaagctcaccgtggacaagagcaggtggcagcaggggaacgtcttctcatgctccgtgatgcatgaggctctgcacaaccactacacgcagaagagcctctccctgtctcccgggggaggcggtggatcctctccaggtcaaggtactcaatccgaaaactcctgcacccacttcccgggtaacctgccgaacatgctgcgtgacctgcgtgacgctttctcccgtgttgacaccttcttccagatgaaagaccagctggacaacctgctgctgaaagaatccctgctggaagacttcaaaggttacctgggttgtcaggctctgtccgaaatgatccagttctacctggaagaagttatgccgcaggctgaaaaccaggacccggacatcaaagctcacgttaactccctgggtgaaaacctgaaaaccctgcgtctgcgtctgcgccgttgccatcgattcctgccgtgcgaaaacggtggcggttctggtggtaaatccaaagctgttgaacaggttaaaaacgctttcaacaaactgcaggaaaaaggtatctacaaagctatgtccgaattcgacatcttcatcaactacatcgaagcttacatgaccatgaaaatccgtaactag

SEQ ID NO: 492 - DNA, 711 bp, synthetic construct; identical to SEQ ID NO: 480
  misc_feature 1..711: note = Synthetic
  source 1..711: mol_type = other DNA

SEQ ID NO: 493 - DNA, 1935 bp, synthetic construct
  misc_feature 1..1935: note = Synthetic
  source 1..1935: mol_type = other DNA
atggacatgagggtgcccgctcagctcctggggctcctgctgctgtggctgagaggtgcgcgctgtcaggtgcaactggtgcagtctggggctgaggtgacgaagcctggggcctcagtgaaggtgtcctgcaaggcttctggatacaccttcaccagatatgatatcaactgggtgcgacaggccactggacaagggcttgagtggatgggatggatgaaccctaacagtggtaattcaggctctgtacagaaattccggggcagagtcaccatgaccagggacacctccatcaccacagtctatatggaactgagcagcctgagatctgatgacacggccgtgtattactgtgcgagaggaggaattagcagcagctggcactgggcttttgatatctggggccaagggacaatggtcaccgtgtcttcagcctccaccaagggcccatcggtcttccccctggcaccctcctccaagagcacctctgggggcacagcggccctgggctgcctggtcaaggactacttccccgaaccggtgacggtgtcgtggaactcaggcgccctgaccagcggcgtgcacaccttcccggctgtcctacagtcctcaggactctactccctcagcagcgtggtgaccgtgccctccagcagcttgggcacccagacctacatctgcaacgtgaatcacaagcccagcaacaccaaggtggacaagaaagttgagcccaaatcttgtgacaaaactcacacatgcccaccgtgcccagcacctgaactcctggggggaccgtcagtcttcctcttccccccaaaacccaaggacaccctcatgatctcccggacccctgaggtcacatgcgtggtggtggacgtgagccacgaagaccctgaggtcaagttcaactggtacgtggacggcgtggaggtgcataatgccaagacaaagccgtgcgaggagcagtacggcagcacgtaccgttgcgtcagcgtcctcaccgtcctgcaccaggactggctgaatggcaaggagtacaagtgcaaggtgtccaacaaagccctcccagcccccatcgagaaaaccatctccaaagccaaagggcagccccgagaaccacaggtgtacaccctgcccccatcccgggaggagatgaccaagaaccaggtcagcctgacctgcctggtcaaaggcttctatcccagcgacatcgccgtggagtgggagagcaatgggcagccggagaacaactacaagaccacgcctcccgtgctggactccgacggctccttcttcctctatagcaagctcaccgtggacaagagcaggtggcagcaggggaacgtcttctcatgctccgtgatgcatgaggctctgcacaaccactacacgcagaagagcctctccctgtctcccgggggaggcggtggatcctctccaggtcaaggtactcaatccgaaaactcctgcacccacttcccgggtaacctgccgaacatgctgcgtgacctgcgtgacgctttctcccgtgttaaaaccttcttcgagatgaaagaccagctggacaacctgctgctgaaagaatccctgctggaagacttcaaaggttacctgggttgtcaggctctgtccgaaatgatccagttctacctggaagaagttatgccgcaggctgaaaaccaggacccggacatcaaagctcacgttaactccctgggtgaaaacctgaaaaccctgcgtctgcgtctgcgccgttgccatcgattcctgccgtgcgaaaacggtggcggttctggtggtaaatccaaagctgttgaacaggttaaaaacgctttcaacaaactgcaggaaaaaggtatctacaaagctatgtccgaattcgacatcttcatcaactacatcgaagcttacatgaccatgaaaatccgtaactag

SEQ ID NO: 494 - DNA, 711 bp, synthetic construct; identical to SEQ ID NO: 480
  misc_feature 1..711: note = Synthetic
  source 1..711: mol_type = other DNA

SEQ ID NO: 495 - DNA, 1926 bp, synthetic construct
  misc_feature 1..1926: note = Synthetic
  source 1..1926: mol_type = other DNA
atggacatgagggtgcccgctcagctcctggggctcctgctgctgtggctgagaggtgcgcgctgtgaggtgcagctgttggagtctgggggaggcttggtacagcctggggggtccctgagactctcctgtgcagcctctggattcacctttagcagctatgccatgacctgggtccgccaggctccagggagggggctgcagtgggtgtcaactattagtggtagtggtagtaacacatactacgcagactccgtgaagggccggttcaccatctccagagacaattccaagaacacgctgtatctgcaaatgagcagcctgagagccgaggacacggccgtatattactgtgcgaaagaggggggcagtaaccgatacttccaccactggggccagggcaccctggtcaccatctcctcagcctccaccaagggcccatcggtcttccccctggcaccctcctccaagagcacctctgggggcacagcggccctgggctgcctggtcaaggactacttccccgaaccggtgacggtgtcgtggaactcaggcgccctgaccagcggcgtgcacaccttcccggctgtcctacagtcctcaggactctactccctcagcagcgtggtgaccgtgccctccagcagcttgggcacccagacctacatctgcaacgtgaatcacaagcccagcaacaccaaggtggacaagaaagttgagcccaaatcttgtgacaaaactcacacatgcccaccgtgcccagcacctgaactcctggggggaccgtcagtcttcctcttccccccaaaacccaaggacaccctcatgatctcccggacccctgaggtcacatgcgtggtggtggacgtgagccacgaagaccctgaggtcaagttcaactggtacgtggacggcgtggaggtgcataatgccaagacaaagccgtgcgaggagcagtacggcagcacgtaccgttgcgtcagcgtcctcaccgtcctgcaccaggactggctgaatggcaaggagtacaagtgcaaggtgtccaacaaagccctcccagcccccatcgagaaaaccatctccaaagccaaagggcagccccgagaaccacaggtgtacaccctgcccccatcccgggaggagatgaccaagaaccaggtcagcctgacctgcctggtcaaaggcttctatcccagcgacatcgccgtggagtgggagagcaatgggcagccggagaacaactacaagaccacgcctcccgtgctggactccgacggctccttcttcctctatagcaagctcaccgtggacaagagcaggtggcagcaggggaacgtcttctcatgctccgtgatgcatgaggctctgcacaaccactacacgcagaagagcctctccctgtctcccgggggaggcggtggatcctctccaggtcaaggtactcaatccgaaaactcctgcacccacttcccgggtaacctgccgaacatgctgcgtgacctgcttgacgctttctcccgtgttaaaaccttcttccagatgaaagaccagctggacaacctgctgctgaaagaatccctgctggaagacttcaaaggttacctgggttgtcaggctctgtccgaaatgatccagttctacctggaagaagttatgccgcaggctgaaaaccaggacccggacatcaaagctcacgttaactccctgggtgaaaacctgaaaaccctgcgtctgcgtctgcgccgttgccatcgattcctgccgtgcgaaaacggtggcggttctggtggtaaatccaaagctgttgaacaggttaaaaacgctttcaacaaactgcaggaaaaaggtatctacaaagctatgtccgaattcgacatcttcatcaactacatcgaagcttacatgaccatgaaaatccgtaactag

SEQ ID NO: 496 - DNA, 711 bp, synthetic construct
  misc_feature 1..711: note = Synthetic
  source 1..711: mol_type = other DNA
atggacatgagggtgcccgctcagctcctggggctcctgctgctgtggctgagaggtgcgcgctgtgacatccagatgacccagtctccatcttccctgtctgcatctgtaggagacagagtcaccatcacttgccgggcaagtcagagcattagcagcaatttaaattggtatcagcagaaaccagggaaagcccctaagctcctgatctctgctgcatccaatttgcaaagtggggtcccatcaaggttcagtggcagtgaatctgggacagatttcactctcaccatcagcagtctacaatctgaagattttgcaacttactactgtcaacagagtgacagtctcccgctcactttcggcggagggaccaaggtggagatcaagcgaacggtggctgcaccatctgtcttcatcttcccgccatctgatgagcagttgaaatctggaactgcctctgttgtgtgcctgctgaataacttctatcccagagaggccaaagtacagtggaaggtggataacgccctccaatcgggtaactcccaggagagtgtcacagagcaggacagcaaggacagcacctacagcctcagcagcaccctgacgctgagcaaagcagactacgagaaacacaaagtctacgcctgcgaagtcacccatcagggcctgagctcgcccgtcacaaagagcttcaacaggggagagtgttag

SEQ ID NO: 497 - DNA, 1926 bp, synthetic construct
  misc_feature 1..1926: note = Synthetic
  source 1..1926: mol_type = other DNA
atggacatgagggtgcccgctcagctcctggggctcctgctgctgtggctgagaggtgcgcgctgtgaggtgcagctgttggagtctgggggaggcttggtacagcctggggggtccctgagactctcctgtgcagcctctggattcacctttagcagctatgccatgacctgggtccgccaggctccagggagggggctgcagtgggtgtcaactattagtggtagtggtagtaacacatactacgcagactccgtgaagggccggttcaccatctccagagacaattccaagaacacgctgtatctgcaaatgagcagcctgagagccgaggacacggccgtatattactgtgcgaaagaggggggcagtaaccgatacttccaccactggggccagggcaccctggtcaccatctcctcagcctccaccaagggcccatcggtcttccccctggcaccctcctccaagagcacctctgggggcacagcggccctgggctgcctggtcaaggactacttccccgaaccggtgacggtgtcgtggaactcaggcgccctgaccagcggcgtgcacaccttcccggctgtcctacagtcctcaggactctactccctcagcagcgtggtgaccgtgccctccagcagcttgggcacccagacctacatctgcaacgtgaatcacaagcccagcaacaccaaggtggacaagaaagttgagcccaaatcttgtgacaaaactcacacatgcccaccgtgcccagcacctgaactcctggggggaccgtcagtcttcctcttccccccaaaacccaaggacaccctcatgatctcccggacccctgaggtcacatgcgtggtggtggacgtgagccacgaagaccctgaggtcaagttcaactggtacgtggacggcgtggaggtgcataatgccaagacaaagccgtgcgaggagcagtacggcagcacgtaccgttgcgtcagcgtcctcaccgtcctgcaccaggactggctgaatggcaaggagtacaagtgcaaggtgtccaacaaagccctcccagcccccatcgagaaaaccatctccaaagccaaagggcagccccgagaaccacaggtgtacaccctgcccccatcccgggaggagatgaccaagaaccaggtcagcctgacctgcctggtcaaaggcttctatcccagcgacatcgccgtggagtgggagagcaatgggcagccggagaacaactacaagaccacgcctcccgtgctggactccgacggctccttcttcctctatagcaagctcaccgtggacaagagcaggtggcagcaggggaacgtcttctcatgctccgtgatgcatgaggctctgcacaaccactacacgcagaagagcctctccctgtctcccgggggaggcggtggatcctctccaggtcaaggtactcaatccgaaaactcctgcacccacttcccgggtaacctgccgaacatgctgcgtgacctgcgtgacgctttctcccgtgttaaaaccttcttccagatgaaagaccagctggacaacctgctgctgaaagaatccctgctggaagacttcaaaggttacctgggttgtcaggctctgtccgaaatgatccagttctacctggaagaagttatgccgcaggctgaaaaccaggacccggacatcaaagctcacgttaactccctgggtgaaaacctgaaaaccctgcgtctgcgtctgcgccgttgccatcgattcctgccgtgcgaaaacggtggcggttctggtggtaaatccaaagctgttgaacaggttaaaaacgctttcaacaaactgcaggaaaaaggtatctacttagctatgtccgaattcgacatcttcatcaactacatcgaagcttacatgaccatgaaaatccgtaactag

SEQ ID NO: 498 - DNA, 711 bp, synthetic construct; identical to SEQ ID NO: 496
  misc_feature 1..711: note = Synthetic
  source 1..711: mol_type = other DNA

SEQ ID NO: 499 - DNA, 1926 bp, synthetic construct
  misc_feature 1..1926: note = Synthetic
  source 1..1926: mol_type = other DNA
atggacatgagggtgcccgctcagctcctggggctcctgctgctgtggctgagaggtgcgcgctgtgaggtgcagctgttggagtctgggggaggcttggtacagcctggggggtccctgagactctcctgtgcagcctctggattcacctttagcagctatgccatgacctgggtccgccaggctccagggagggggctgcagtgggtgtcaactattagtggtagtggtagtaacacatactacgcagactccgtgaagggccggttcaccatctccagagacaattccaagaacacgctgtatctgcaaatgagcagcctgagagccgaggacacggccgtatattactgtgcgaaagaggggggcagtaaccgatacttccaccactggggccagggcaccctggtcaccatctcctcagcctccaccaagggcccatcggtcttccccctggcaccctcctccaagagcacctctgggggcacagcggccctgggctgcctggtcaaggactacttccccgaaccggtgacggtgtcgtggaactcaggcgccctgaccagcggcgtgcacaccttcccggctgtcctacagtcctcaggactctactccctcagcagcgtggtgaccgtgccctccagcagcttgggcacccagacctacatctgcaacgtgaatcacaagcccagcaacaccaaggtggacaagaaagttgagcccaaatcttgtgacaaaactcacacatgcccaccgtgcccagcacctgaactcctggggggaccgtcagtcttcctcttccccccaaaacccaaggacaccctcatgatctcccggacccctgaggtcacatgcgtggtggtggacgtgagccacgaagaccctgaggtcaagttcaactggtacgtggacggcgtggaggtgcataatgccaagacaaagccgtgcgaggagcagtacggcagcacgtaccgttgcgtcagcgtcctcaccgtcctgcaccaggactggctgaatggcaaggagtacaagtgcaaggtgtccaacaaagccctcccagcccccatcgagaaaaccatctccaaagccaaagggcagccccgagaaccacaggtgtacaccctgcccccatcccgggaggagatgaccaagaaccaggtcagcctgacctgcctggtcaaaggcttctatcccagcgacatcgccgtggagtgggagagcaatgggcagccggagaacaactacaagaccacgcctcccgtgctggactccgacggctccttcttcctctatagcaagctcaccgtggacaagagcaggtggcagcaggggaacgtcttctcatgctccgtgatgcatgaggctctgcacaaccactacacgcagaagagcctctccctgtctcccgggggaggcggtggatcctctccaggtcaaggtactcaatccgaaaactcctgcacccacttcccgggtaacctgccgaacatgctgcgtgacctgcgtgacgctttctcccgtgttaaaaccttcttccagatgaaagaccagctggacaacctgctgctgaaagaatccctgctggaagacttcaaaggttacctgggttgtcaggctctgtccgaaatgatccagttctacctggaagaagttatgccgcaggctgaaaaccaggacccggacatcaaagctcacgttaactccctgggtgaaaacctgaaaaccctgcgtctgcgtctgcgccgttgccatcgattcctgccgtgcgaaaacggtggcggttctggtggtaaatccaaagctgttgaacaggttaaaaacgctttcaacaaactgcaggaaaaaggtatctacgacgctatgtccgaattcgacatcttcatcaactacatcgaagcttacatgaccatgaaaatccgtaactag

SEQ ID NO: 500 - DNA, 711 bp, synthetic construct; identical to SEQ ID NO: 496
  misc_feature 1..711: note = Synthetic
  source 1..711: mol_type = other DNA

SEQ ID NO: 501 - DNA, 1926 bp, synthetic construct
  misc_feature 1..1926: note = Synthetic
  source 1..1926: mol_type = other DNA
atggacatgagggtgcccgctcagctcctggggctcctgctgctgtggctgagaggtgcgcgctgtgaggtgcagctgttggagtctgggggaggcttggtacagcctggggggtccctgagactctcctgtgcagcctctggattcacctttagcagctatgccatgacctgggtccgccaggctccagggagggggctgcagtgggtgtcaactattagtggtagtggtagtaacacatactacgcagactccgtgaagggccggttcaccatctccagagacaattccaagaacacgctgtatctgcaaatgagcagcctgagagccgaggacacggccgtatattactgtgcgaaagaggggggcagtaaccgatacttccaccactggggccagggcaccctggtcaccatctcctcagcctccaccaagggcccatcggtcttccccctggcaccctcctccaagagcacctctgggggcacagcggccctgggctgcctggtcaaggactacttccccgaaccggtgacggtgtcgtggaactcaggcgccctgaccagcggcgtgcacaccttcccggctgtcctacagtcctcaggactctactccctcagcagcgtggtgaccgtgccctccagcagcttgggcacccagacctacatctgcaacgtgaatcacaagcccagcaacaccaaggtggacaagaaagttgagcccaaatcttgtgacaaaactcacacatgcccaccgtgcccagcacctgaactcctggggggaccgtcagtcttcctcttccccccaaaacccaaggacaccctcatgatctcccggacccctgaggtcacatgcgtggtggtggacgtgagccacgaagaccctgaggtcaagttcaactggtacgtggacggcgtggaggtgcataatgccaagacaaagccgtgcgaggagcagtacggcagcacgtaccgttgcgtcagcgtcctcaccgtcctgcaccaggactggctgaatggcaaggagtacaagtgcaaggtgtccaacaaagccctcccagcccccatcgagaaaaccatctccaaagccaaagggcagccccgagaaccacaggtgtacaccctgcccccatcccgggaggagatgaccaagaaccaggtcagcctgacctgcctggtcaaaggcttctatcccagcgacatcgccgtggagtgggagagcaatgggcagccggagaacaactacaagaccacgcctcccgtgctggactccgacggctccttcttcctctatagcaagctcaccgtggacaagagcaggtggcagcaggggaacgtcttctcatgctccgtgatgcatgaggctctgcacaaccactacacgcagaagagcctctccctgtctcccgggggaggcggtggatcctctccaggtcaaggtactcaatccgaaaactcctgcacccacttcccgggtaacctgccgaacatgctgcgtgacctgcgtgacgctttctcccgtgttaaaaccttcttccagatgaaaggccagctggacaacctgctgctgaaagaatccctgctggaagacttcaaaggttacctgggttgtcaggctctgtccgaaatgatccagttctacctggaagaagttatgccgcaggctgaaaaccaggacccggacatcaaagctcacgttaactccctgggtgaaaacctgaaaaccctgcgtctgcgtctgcgccgttgccatcgattcctgccgtgcgaaaacggtggcggttctggtggtaaatccaaagctgttgaacaggttaaaaacgctttcaacaaactgcaggaaaaaggtatctacaaagctatgtccgaattcgacatcttcatcaactacatcgaagcttacatgaccatgaaaatccgtaactag

SEQ ID NO: 502 - DNA, 711 bp, synthetic construct; identical to SEQ ID NO: 496
  misc_feature 1..711: note = Synthetic
  source 1..711: mol_type = other DNA

SEQ ID NO: 503 - DNA, 1926 bp, synthetic construct
  misc_feature 1..1926: note = Synthetic
  source 1..1926: mol_type = other DNA
atggacatgagggtgcccgctcagctcctggggctcctgctgctgtggctgagaggtgcgcgctgtgaggtgcagctgttggagtctgggggaggcttggtacagcctggggggtccctgagactctcctgtgcagcctctggattcacctttagcagctatgccatgacctgggtccgccaggctccagggagggggctgcagtgggtgtcaactattagtggtagtggtagtaacacatactacgcagactccgtgaagggccggttcaccatctccagagacaattccaagaacacgctgtatctgcaaatgagcagcctgagagccgaggacacggccgtatattactgtgcgaaagaggggggcagtaaccgatacttccaccactggggccagggcaccctggtcaccatctcctcagcctccaccaagggcccatcggtcttccccctggcaccctcctccaagagcacctctgggggcacagcggccctgggctgcctggtcaaggactacttccccgaaccggtgacggtgtcgtggaactcaggcgccctgaccagcggcgtgcacaccttcccggctgtcctacagtcctcaggactctactccctcagcagcgtggtgaccgtgccctccagcagcttgggcacccagacctacatctgcaacgtgaatcacaagcccagcaacaccaaggtggacaagaaagttgagcccaaatcttgtgacaaaactcacacatgcccaccgtgcccagcacctgaactcctggggggaccgtcagtcttcctcttccccccaaaacccaaggacaccctcatgatctcccggacccctgaggtcacatgcgtggtggtggacgtgagccacgaagaccctgaggtcaagttcaactggtacgtggacggcgtggaggtgcataatgccaagacaaagccgtgcgaggagcagtacggcagcacgtaccgttgcgtcagcgtcctcaccgtcctgcaccaggactggctgaatggcaaggagtacaagtgcaaggtgtccaacaaagccctcccagcccccatcgagaaaaccatctccaaagccaaagggcagccccgagaaccacaggtgtacaccctgcccccatcccgggaggagatgaccaagaaccaggtcagcctgacctgcctggtcaaaggcttctatcccagcgacatcgccgtggagtgggagagcaatgggcagccggagaacaactacaagaccacgcctcccgtgctggactccgacggctccttcttcctctatagcaagctcaccgtggacaagagcaggtggcagcaggggaacgtcttctcatgctccgtgatgcatgaggctctgcacaaccactacacgcagaagagcctctccctgtctcccgggggaggcggtggatcctctccaggtcaaggtactcaatccgaaaactcctgcacccacttcccgggtaacctgccgaacatgctgcgtgacctgcgtgacgctttctcccgtgttaaaaccttcttccggatgaaagaccagctggacaacctgctgctgaaagaatccctgctggaagacttcaaaggttacctgggttgtcaggctctgtccgaaatgatccagttctacctggaagaagttatgccgcaggctgaaaaccaggacccggacatcaaagctcacgttaactccctgggtgaaaacctgaaaaccctgcgtctgcgtctgcgccgttgccatcgattcctgccgtgcgaaaacggtggcggttctggtggtaaatccaaagctgttgaacaggttaaaaacgctttcaacaaactgcaggaaaaaggtatctacaaagctatgtccgaattcgacatcttcatcaactacatcgaagcttacatgaccatgaaaatccgtaactag

SEQ ID NO: 504 - DNA, 711 bp, synthetic construct; identical to SEQ ID NO: 496
  misc_feature 1..711: note = Synthetic
  source 1..711: mol_type = other DNA

SEQ ID NO: 505 - DNA, 1926 bp, synthetic construct
  misc_feature 1..1926: note = Synthetic
  source 1..1926: mol_type = other DNA
atggacatgagggtgcccgctcagctcctggggctcctgctgctgtggctgagaggtgcgcgctgtgaggtgcagctgttggagtctgggggaggcttggtacagcctggggggtccctgagactctcctgtgcagcctctggattcacctttagcagctatgccatgacctgggtccgccaggctccagggagggggctgcagtgggtgtcaactattagtggtagtggtagtaacacatactacgcagactccgtgaagggccggttcaccatctccagagacaattccaagaacacgctgtatctgcaaatgagcagcctgagagccgaggacacggccgtatattactgtgcgaaagaggggggcagtaaccgatacttccaccactggggccagggcaccctggtcaccatctcctcagcctccaccaagggcccatcggtcttccccctggcaccctcctccaagagcacctctgggggcacagcggccctgggctgcctggtcaaggactacttccccgaaccggtgacggtgtcgtggaactcaggcgccctgaccagcggcgtgcacaccttcccggctgtcctacagtcctcaggactctactccctcagcagcgtggtgaccgtgccctccagcagcttgggcacccagacctacatctgcaacgtgaatcacaagcccagcaacaccaaggtggacaagaaagttgagcccaaatcttgtgacaaaactcacacatgcccaccgtgcccagcacctgaactcctggggggaccgtcagtcttcctcttccccccaaaacccaaggacaccctcatgatctcccggacccctgaggtcacatgcgtggtggtggacgtgagccacgaagaccctgaggtcaagttcaactggtacgtggacggcgtggaggtgcataatgccaagacaaagccgtgcgaggagcagtacggcagcacgtaccgttgcgtcagcgtcctcaccgtcctgcaccaggactggctgaatggcaaggagtacaagtgcaaggtgtccaacaaagccctcccagcccccatcgagaaaaccatctccaaagccaaagggcagccccgagaaccacaggtgtacaccctgcccccatcccgggaggagatgaccaagaaccaggtcagcctgacctgcctggtcaaaggcttctatcccagcgacatcgccgtggagtgggagagcaatgggcagccggagaacaactacaagaccacgcctcccgtgctggactccgacggctccttcttcctctatagcaagctcaccgtggacaagagcaggtggcagcaggggaacgtcttctcatgctccgtgatgcatgaggctctgcacaaccactacacgcagaagagcctctccctgtctcccgggggaggcggtggatcctctccaggtcaaggtactcaatccgaaaactcctgcacccacttcccgggtaacctgccgaacatgctgcgtgacctgcgtgacgctttctcccgtgttaaaaccttcttccagatgaaagaccagctggacaacaagctgctgaaagaatccctgctggaagacttcaaaggttacctgggttgtcaggctctgtccgaaatgatccagttctacctggaagaagttatgccgcaggctgaaaaccaggacccggacatcaaagctcacgttaactccctgggtgaaaacctgaaaaccctgcgtctgcgtctgcgccgttgccatcgattcctgccgtgcgaaaacggtggcggttctggtggtaaatccaaagctgttgaacaggttaaaaacgctttcaacaaactgcaggaaaaaggtatctacaaagctatgtccgaattcgacatcttcatcaactacatcgaagcttacatgaccatgaaaatccgtaactag

SEQ ID NO: 506 - DNA, 711 bp, synthetic construct; identical to SEQ ID NO: 496
  misc_feature 1..711: note = Synthetic
  source 1..711: mol_type = other DNA

SEQ ID NO: 507 - DNA, 1926 bp, synthetic construct
  misc_feature 1..1926: note = Synthetic
  source 1..1926: mol_type = other DNA
atggacatgagggtgcccgctcagctcctggggctcctgctgctgtggctgagaggtgcgcgctgtgaggtgcagctgttggagtctgggggaggcttggtacagcctggggggtccctgagactctcctgtgcagcctctggattcacctttagcagctatgccatgacctgggtccgccaggctccagggagggggctgcagtgggtgtcaactattagtggtagtggtagtaacacatactacgcagactccgtgaagggccggttcaccatctccagagacaattccaagaacacgctgtatctgcaaatgagcagcctgagagccgaggacacggccgtatattactgtgcgaaagaggggggcagtaaccgatacttccaccactggggccagggcaccctggtcaccatctcctcagcctccaccaagggcccatcggtcttccccctggcaccctcctccaagagcacctctgggggcacagcggccctgggctgcctggtcaaggactacttccccgaaccggtgacggtgtcgtggaactcaggcgccctgaccagcggcgtgcacaccttcccggctgtcctacagtcctcaggactctactccctcagcagcgtggtgaccgtgccctccagcagcttgggcacccagacctacatctgcaacgtgaatcacaagcccagcaacaccaaggtggacaagaaagttgagcccaaatcttgtgacaaaactcacacatgcccaccgtgcccagcacctgaactcctggggggaccgtcagtcttcctcttccccccaaaacccaaggacaccctcatgatctcccggacccctgaggtcacatgcgtggtggtggacgtgagccacgaagaccctgaggtcaagttcaactggtacgtggacggcgtggaggtgcataatgccaagacaaagccgtgcgaggagcagtacggcagcacgtaccgttgcgtcagcgtcctcaccgtcctgcaccaggactggctgaatggcaaggagtacaagtgcaaggtgtccaacaaagccctcccagcccccatcgagaaaaccatctccaaagccaaagggcagccccgagaaccacaggtgtacaccctgcccccatcccgggaggagatgaccaagaaccaggtcagcctgacctgcctggtcaaaggcttctatcccagcgacatcgccgtggagtgggagagcaatgggcagccggagaacaactacaagaccacgcctcccgtgctggactccgacggctccttcttcctctatagcaagctcaccgtggacaagagcaggtggcagcaggggaacgtcttctcatgctccgtgatgcatgaggctctgcacaaccactacacgcagaagagcctctccctgtctcccgggggaggcggtggatcctctccaggtcaaggtactcaatccgaaaactcctgcacccacttcccgggtaacctgccgaacatgctgcgtgacctgcgtgacgctttctcccgtgttgacaccttcttccagatgaaagaccagctggacaacctgctgctgaaagaatccctgctggaagacttcaaaggttacctgggttgtcaggctctgtccgaaatgatccagttctacctggaagaagttatgccgcaggctgaaaaccaggacccggacatcaaagctcacgttaactccctgggtgaaaacctgaaaaccctgcgtctgcgtctgcgccgttgccatcgattcctgccgtgcgaaaacggtggcggttctggtggtaaatccaaagctgttgaacaggttaaaaacgctttcaacaaactgcaggaaaaaggtatctacaaagctatgtccgaattcgacatcttcatcaactacatcgaagcttacatgaccatgaaaatccgtaactag

SEQ ID NO: 508 - DNA, 711 bp, synthetic construct; identical to SEQ ID NO: 496
  misc_feature 1..711: note = Synthetic
  source 1..711: mol_type = other DNA

SEQ ID NO: 509 - DNA, 1926 bp, synthetic construct
  misc_feature 1..1926: note = Synthetic
  source 1..1926: mol_type = other DNA
atggacatgagggtgcccgctcagctcctggggctcctgctgctgtggctgagaggtgcgcgctgtgaggtgcagctgttggagtctgggggaggcttggtacagcctggggggtccctgagactctcctgtgcagcctctggattcacctttagcagctatgccatgacctgggtccgccaggctccagggagggggctgcagtgggtgtcaactattagtggtagtggtagtaacacatactacgcagactccgtgaagggccggttcaccatctccagagacaattccaagaacacgctgtatctgcaaatgagcagcctgagagccgaggacacggccgtatattactgtgcgaaagaggggggcagtaaccgatacttccaccactggggccagggcaccctggtcaccatctcctcagcctccaccaagggcccatcggtcttccccctggcaccctcctccaagagcacctctgggggcacagcggccctgggctgcctggtcaaggactacttccccgaaccggtgacggtgtcgtggaactcaggcgccctgaccagcggcgtgcacaccttcccggctgtcctacagtcctcaggactctactccctcagcagcgtggtgaccgtgccctccagcagcttgggcacccagacctacatctgcaacgtgaatcacaagcccagcaacaccaaggtggacaagaaagttgagcccaaatcttgtgacaaaactcacacatgcccaccgtgcccagcacctgaactcctggggggaccgtcagtcttcctcttccccccaaaacccaaggacaccctcatgatctcccggacccctgaggtcacatgcgtggtggtggacgtgagccacgaagaccctgaggtcaagttcaactggtacgtggacggcgtggaggtgcataatgccaagacaaagccgtgcgaggagcagtacggcagcacgtaccgttgcgtcagcgtcctcaccgtcctgcaccaggactggctgaatggcaaggagtacaagtgcaaggtgtccaacaaagccctcccagcccccatcgagaaaaccatctccaaagccaaagggcagccccgagaaccacaggtgtacaccctgcccccatcccgggaggagatgaccaagaaccaggtcagcctgacctgcctggtcaaaggcttctatcccagcgacatcgccgtggagtgggagagcaatgggcagccggagaacaactacaagaccacgcctcccgtgctggactccgacggctccttcttcctctatagcaagctcaccgtggacaagagcaggtggcagcaggggaacgtcttctcatgctccgtgatgcatgaggctctgcacaaccactacacgcagaagagcctctccctgtctcccgggggaggcggtggatcctctccaggtcaaggtactcaatccgaaaactcctgcacccacttcccgggtaacctgccgaacatgctgcgtgacctgcgtgacgctttctcccgtgttaaaaccttcttcgagatgaaagaccagctggacaacctgctgctgaaagaatccctgctggaagacttcaaaggttacctgggttgtcaggctctgtccgaaatgatccagttctacctggaagaagttatgccgcaggctgaaaaccaggacccggacatcaaagctcacgttaactccctgggtgaaaacctgaaaaccctgcgtctgcgtctgcgccgttgccatcgattcctgccgtgcgaaaacggtggcggttctggtggtaaatccaaagctgttgaacaggttaaaaacgctttcaacaaactgcaggaaaaaggtatctacaaagctatgtccgaattcgacatcttcatcaactacatcgaagcttacatgaccatgaaaatccgtaactag

SEQ ID NO: 510 - DNA, 711 bp, synthetic construct; identical to SEQ ID NO: 496
  misc_feature 1..711: note = Synthetic
  source 1..711: mol_type = other DNA

SEQ ID NO: 511 - DNA, 1935 bp, synthetic construct
  misc_feature 1..1935: note = Synthetic
  source 1..1935: mol_type = other DNA
atggacatgagggtgcccgctcagctcctggggctcctgctgctgtggctgagaggtgcgcgctgtcaggtgcagctggtgcagtctggggctgaggtgaagaagcctggggcctcagtgaaggtgtcctgcaaggcttctggatacaccttcaccagatatgatatcaactgggtgcgacaggccactggacaaggacttgagtggatgggatggatgaaccctaacagtggtaactcaggctctgtacagaagttccggggcagagtcaccatgaccagggacacctccatccacatcgcctacatggaactgagcagcctgagatctgaggacacggccgtgtattactgtgcgagaggcgggtataccagcagctggcggtggtacttcgatctctggggccgtggcaccctggtcactgtctcctcagcctccaccaagggcccatcggtcttccccctggcaccctcctccaagagcacctctgggggcacagcggccctgggctgcctggtcaaggactacttccccgaaccggtgacggtgtcgtggaactcaggcgccctgaccagcggcgtgcacaccttcccggctgtcctacagtcctcaggactctactccctcagcagcgtggtgaccgtgccctccagcagcttgggcacccagacctacatctgcaacgtgaatcacaagcccagcaacaccaaggtggacaagaaagttgagcccaaatcttgtgacaaaactcacacatgcccaccgtgcccagcacctgaactcctggggggaccgtcagtcttcctcttccccccaaaacccaaggacaccctcatgatctcccggacccctgaggtcacatgcgtggtggtggacgtgagccacgaagaccctgaggtcaagttcaactggtacgtggacggcgtggaggtgcataatgccaagacaaagccgtgcgaggagcagtacggcagcacgtaccgttgcgtcagcgtcctcaccgtcctgcaccaggactggctgaatggcaaggagtacaagtgcaaggtgtccaacaaagccctcccagcccccatcgagaaaaccatctccaaagccaaagggcagccccgagaaccacaggtgtacaccctgcccccatcccgggaggagatgaccaagaaccaggtcagcctgacctgcctggtcaaaggcttctatcccagcgacatcgccgtggagtgggagagcaatgggcagccggagaacaactacaagaccacgcctcccgtgctggactccgacggctccttcttcctctatagcaagctcaccgtggacaagagcaggtggcagcaggggaacgtcttctcatgctccgtgatgcatgaggctctgcacaaccactacacgcagaagagcctctccctgtctcccgggggaggcggtggatcctctccaggtcaaggtactcaatccgaaaactcctgcacccacttcccgggtaacctgccgaacatgctgcgtgacctgcttgacgctttctcccgtgttaaaaccttcttccagatgaaagaccagctggacaacctgctgctgaaagaatccctgctggaagacttcaaaggttacctgggttgtcaggctctgtccgaaatgatccagttctacctggaagaagttatgccgcaggctgaaaaccaggacccggacatcaaagctcacgttaactccctgggtgaaaacctgaaaaccctgcgtctgcgtctgcgccgttgccatcgattcctgccgtgcgaaaacggtggcggttctggtggtaaatccaaagctgttgaacaggttaaaaacgctttcaacaaactgcaggaaaaaggtatctacaaagctatgtccgaattcgacatcttcatcaactacatcgaagcttacatgaccatgaaaatccgtaactag

SEQ ID NO: 512 - DNA, 711 bp, synthetic construct
  misc_feature 1..711: note = Synthetic
  source 1..711: mol_type = other DNA
atggacatgagggtgcccgctcagctcctggggctcctgctgctgtggctgagaggtgcgcgctgtgacatccagatgacccagtctccatcctccctgtctgcatctgtaggagacagagtcaccatcacttgccaggcgagtcaggacattaggaaacatttaaattggtatcagcagaaaccagggaaagcccctaacctcctgatctacgatgcagccaatttggaaacaggggtcccatcaaggttcagtggaagtggttctgggacagcttttactttcaccatcagcagcctgcagcctgaagatattgcaacatattactgtcaacactatgctaatctcccgatcaccttcggccaagggacacgactggagattaaacgaacggtggctgcaccatctgtcttcatcttcccgccatctgatgagcagttgaaatctggaactgcctctgttgtgtgcctgctgaataacttctatcccagagaggccaaagtacagtggaaggtggataacgccctccaatcgggtaactcccaggagagtgtcacagagcaggacagcaaggacagcacctacagcctcagcagcaccctgacgctgagcaaagcagactacgagaaacacaaagtctacgcctgcgaagtcacccatcagggcctgagctcgcccgtcacaaagagcttcaacaggggagagtgttag

SEQ ID NO: 513 - DNA, 1935 bp, synthetic construct
  misc_feature 1..1935: note = Synthetic
  source 1..1935: mol_type = other DNA
atggacatgagggtgcccgctcagctcctggggctcctgctgctgtggctgagaggtgcgcgctgtcaggtgcagctggtgcagtctggggctgaggtgaagaagcctggggcctcagtgaaggtgtcctgcaaggcttctggatacaccttcaccagatatgatatcaactgggtgcgacaggccactggacaaggacttgagtggatgggatggatgaaccctaacagtggtaactcaggctctgtacagaagttccggggcagagtcaccatgaccagggacacctccatccacatcgcctacatggaactgagcagcctgagatctgaggacacggccgtgtattactgtgcgagaggcgggtataccagcagctggcggtggtacttcgatctctggggccgtggcaccctggtcactgtctcctcagcctccaccaagggcccatcggtcttccccctggcaccctcctccaagagcacctctgggggcacagcggccctgggctgcctggtcaaggactacttccccgaaccggtgacggtgtcgtggaactcaggcgccctgaccagcggcgtgcacaccttcccggctgtcctacagtcctcaggactctactccctcagcagcgtggtgaccgtgccctccagcagcttgggcacccagacctacatctgcaacgtgaatcacaagcccagcaacaccaaggtggacaagaaagttgagcccaaatcttgtgacaaaactcacacatgcccaccgtgcccagcacctgaactcctggggggaccgtcagtcttcctcttccccccaaaacccaaggacaccctcatgatctcccggacccctgaggtcacatgcgtggtggtggacgtgagccacgaagaccctgaggtcaagttcaactggtacgtggacggcgtggaggtgcataatgccaagacaaagccgtgcgaggagcagtacggcagcacgtaccgttgcgtcagcgtcctcaccgtcctgcaccaggactggctgaatggcaaggagtacaagtgcaaggtgtccaacaaagccctcccagcccccatcgagaaaaccatctccaaagccaaagggcagccccgagaaccacaggtgtacaccctgcccccatcccgggaggagatgaccaagaaccaggtcagcctgacctgcctggtcaaaggcttctatcccagcgacatcgccgtggagtgggagagcaatgggcagccggagaacaactacaagaccacgcctcccgtgctggactccgacggctccttcttcctctatagcaagctcaccgtggacaagagcaggtggcagcaggggaacgtcttctcatgctccgtgatgcatgaggctctgcacaaccactacacgcagaagagcctctccctgtctcccgggggaggcggtggatcctctccaggtcaaggtactcaatccgaaaactcctgcacccacttcccgggtaacctgccgaacatgctgcgtgacctgcgtgacgctttctcccgtgttaaaaccttcttccagatgaaagaccagctggacaacctgctgctgaaagaatccctgctggaagacttcaaaggttacctgggttgtcaggctctgtccgaaatgatccagttctacctggaagaagttatgccgcaggctgaaaaccaggacccggacatcaaagctcacgttaactccctgggtgaaaacctgaaaaccctgcgtctgcgtctgcgccgttgccatcgattcctgccgtgcgaaaacggtggcggttctggtggtaaatccaaagctgttgaacaggttaaaaacgctttcaacaaactgcaggaaaaaggtatctacttagctatgtccgaattcgacatcttcatcaactacatcgaagcttacatgaccatgaaaatccgtaactag

SEQ ID NO: 514 - DNA, 711 bp, synthetic construct; identical to SEQ ID NO: 512
  misc_feature 1..711: note = Synthetic
  source 1..711: mol_type = other DNA

SEQ ID NO: 515 - DNA, 1935 bp, synthetic construct
  misc_feature 1..1935: note = Synthetic
  source 1..1935: mol_type = other DNA
atggacatgagggtgcccgctcagctcctggggctcctgctgctgtggctgagaggtgcgcgctgtcaggtgcagctggtgcagtctggggctgaggtgaagaagcctggggcctcagtgaaggtgtcctgcaaggcttctggatacaccttcaccagatatgatatcaactgggtgcgacaggccactggacaaggacttgagtggatgggatggatgaaccctaacagtggtaactcaggctctgtacagaagttccggggcagagtcaccatgaccagggacacctccatccacatcgcctacatggaactgagcagcctgagatctgaggacacggccgtgtattactgtgcgagaggcgggtataccagcagctggcggtggtacttcgatctctggggccgtggcaccctggtcactgtctcctcagcctccaccaagggcccatcggtcttccccctggcaccctcctccaagagcacctctgggggcacagcggccctgggctgcctggtcaaggactacttccccgaaccggtgacggtgtcgtggaactcaggcgccctgaccagcggcgtgcacaccttcccggctgtcctacagtcctcaggactctactccctcagcagcgtggtgaccgtgccctccagcagcttgggcacccagacctacatctgcaacgtgaatcacaagcccagcaacaccaaggtggacaagaaagttgagcccaaatcttgtgacaaaactcacacatgcccaccgtgcccagcacctgaactcctggggggaccgtcagtcttcctcttccccccaaaacccaaggacaccctcatgatctcccggacccctgaggtcacatgcgtggtggtggacgtgagccacgaagaccctgaggtcaagttcaactggtacgtggacggcgtggaggtgcataatgccaagacaaagccgtgcgaggagcagtacggcagcacgtaccgttgcgtcagcgtcctcaccgtcctgcaccaggactggctgaatggcaaggagtacaagtgcaaggtgtccaacaaagccctcccagcccccatcgagaaaaccatctccaaagccaaagggcagccccgagaaccacaggtgtacaccctgcccccatcccgggaggagatgaccaagaaccaggtcagcctgacctgcctggtcaaaggcttctatcccagcgacatcgccgtggagtgggagagcaatgggcagccggagaacaactacaagaccacgcctcccgtgctggactccgacggctccttcttcctctatagcaagctcaccgtggacaagagcaggtggcagcaggggaacgtcttctcatgctccgtgatgcatgaggctctgcacaaccactacacgcagaagagcctctccctgtctcccgggggaggcggtggatcctctccaggtcaaggtactcaatccgaaaactcctgcacccacttcccgggtaacctgccgaacatgctgcgtgacctgcgtgacgctttctcccgtgttaaaaccttcttccagatgaaagaccagctggacaacctgctgctgaaagaatccctgctggaagacttcaaaggttacctgggttgtcaggctctgtccgaaatgatccagttctacctggaagaagttatgccgcaggctgaaaaccaggacccggacatcaaagctcacgttaactccctgggtgaaaacctgaaaaccctgcgtctgcgtctgcgccgttgccatcgattcctgccgtgcgaaaacggtggcggttctggtggtaaatccaaagctgttgaacaggttaaaaacgctttcaacaaactgcaggaaaaaggtatctacgacgctatgtccgaattcgacatcttcatcaactacatcgaagcttacatgaccatgaaaatccgtaactag

SEQ ID NO: 516 - DNA, 711 bp, synthetic construct; identical to SEQ ID NO: 512
  misc_feature 1..711: note = Synthetic
  source 1..711: mol_type = other DNA

SEQ ID NO: 517 - DNA, 1935 bp, synthetic construct
  misc_feature 1..1935: note = Synthetic
  source 1..1935: mol_type = other DNA
atggacatgagggtgcccgctcagctcctggggctcctgctgctgtggctgagaggtgcgcgctgtcaggtgcagctggtgcagtctggggctgaggtgaagaagcctggggcctcagtgaaggtgtcctgcaaggcttctggatacaccttcaccagatatgatatcaactgggtgcgacaggccactggacaaggacttgagtggatgggatggatgaaccctaacagtggtaactcaggctctgtacagaagttccggggcagagtcaccatgaccagggacacctccatccacatcgcctacatggaactgagcagcctgagatctgaggacacggccgtgtattactgtgcgagaggcgggtataccagcagctggcggtggtacttcgatctctggggccgtggcaccctggtcactgtctcctcagcctccaccaagggcccatcggtcttccccctggcaccctcctccaagagcacctctgggggcacagcggccctgggctgcctggtcaaggactacttccccgaaccggtgacggtgtcgtggaactcaggcgccctgaccagcggcgtgcacaccttcccggctgtcctacagtcctcaggactctactccctcagcagcgtggtgaccgtgccctccagcagcttgggcacccagacctacatctgcaacgtgaatcacaagcccagcaacaccaaggtggacaagaaagttgagcccaaatcttgtgacaaaactcacacatgcccaccgtgcccagcacctgaactcctggggggaccgtcagtcttcctcttccccccaaaacccaaggacaccctcatgatctcccggacccctgaggtcacatgcgtggtggtggacgtgagccacgaagaccctgaggtcaagttcaactggtacgtggacggcgtggaggtgcataatgccaagacaaagccgtgcgaggagcagtacggcagcacgtaccgttgcgtcagcgtcctcaccgtcctgcaccaggactggctgaatggcaaggagtacaagtgcaaggtgtccaacaaagccctcccagcccccatcgagaaaaccatctccaaagccaaagggcagccccgagaaccacaggtgtacaccctgcccccatcccgggaggagatgaccaagaaccaggtcagcctgacctgcctggtcaaaggcttctatcccagcgacatcgccgtggagtgggagagcaatgggcagccggagaacaactacaagaccacgcctcccgtgctggactccgacggctccttcttcctctatagcaagctcaccgtggacaagagcaggtggcagcaggggaacgtcttctcatgctccgtgatgcatgaggctctgcacaaccactacacgcagaagagcctctccctgtctcccgggggaggcggtggatcctctccaggtcaaggtactcaatccgaaaactcctgcacccacttcccgggtaacctgccgaacatgctgcgtgacctgcgtgacgctttctcccgtgttaaaaccttcttccagatgaaaggccagctggacaacctgctgctgaaagaatccctgctggaagacttcaaaggttacctgggttgtcaggctctgtccgaaatgatccagttctacctggaagaagttatgccgcaggctgaaaaccaggacccggacatcaaagctcacgttaactccctgggtgaaaacctgaaaaccctgcgtctgcgtctgcgccgttgccatcgattcctgccgtgcgaaaacggtggcggttctggtggtaaatccaaagctgttgaacaggttaaaaacgctttcaacaaactgcaggaaaaaggtatctacaaagctatgtccgaattcgacatcttcatcaactacatcgaagcttacatgaccatgaaaatccgtaactag

SEQ ID NO: 518 - DNA, 711 bp, synthetic construct; identical to SEQ ID NO: 512
  misc_feature 1..711: note = Synthetic
  source 1..711: mol_type = other DNA

SEQ ID NO: 519 - DNA, 1935 bp, synthetic construct
  misc_feature 1..1935: note = Synthetic
  source 1..1935: mol_type = other DNA
atggacatgagggtgcccgctcagctcctggggctcctgctgctgtggctgagaggtgcgcgctgtcaggtgcagctggtgcagtctggggctgaggtgaagaagcctggggcctcagtgaaggtgtcctgcaaggcttctggatacaccttcaccagatatgatatcaactgggtgcgacaggccactggacaaggacttgagtggatgggatggatgaaccctaacagtggtaactcaggctctgtacagaagttccggggcagagtcaccatgaccagggacacctccatccacatcgcctacatggaactgagcagcctgagatctgaggacacggccgtgtattactgtgcgagaggcgggtataccagcagctggcggtggtacttcgatctctggggccgtggcaccctggtcactgtctcctcagcctccaccaagggcccatcggtcttccccctggcaccctcctccaagagcacctctgggggcacagcggccctgggctgcctggtcaaggactacttccccgaaccggtgacggtgtcgtggaactcaggcgccctgaccagcggcgtgcacaccttcccggctgtcctacagtcctcaggactctactccctcagcagcgtggtgaccgtgccctccagcagcttgggcacccagacctacatctgcaacgtgaatcacaagcccagcaacaccaaggtggacaagaaagttgagcccaaatcttgtgacaaaactcacacatgcccaccgtgcccagcacctgaactcctggggggaccgtcagtcttcctcttccccccaaaacccaaggacaccctcatgatctcccggacccctgaggtcacatgcgtggtggtggacgtgagccacgaagaccctgaggtcaagttcaactggtacgtggacggcgtggaggtgcataatgccaagacaaagccgtgcgaggagcagtacggcagcacgtaccgttgcgtcagcgtcctcaccgtcctgcaccaggactggctgaatggcaaggagtacaagtgcaaggtgtccaacaaagccctcccagcccccatcgagaaaaccatctccaaagccaaagggcagccccgagaaccacaggtgtacaccctgcccccatcccgggaggagatgaccaagaaccaggtcagcctgacctgcctggtcaaaggcttctatcccagcgacatcgccgtggagtgggagagcaatgggcagccggagaacaactacaagaccacgcctcccgtgctggactccgacggctccttcttcctctatagcaagctcaccgtggacaagagcaggtggcagcaggggaacgtcttctcatgctccgtgatgcatgaggctctgcacaaccactacacgcagaagagcctctccctgtctcccgggggaggcggtggatcctctccaggtcaaggtactcaatccgaaaactcctgcacccacttcccgggtaacctgccgaacatgctgcgtgacctgcgtgacgctttctcccgtgttaaaaccttcttccggatgaaagaccagctggacaacctgctgctgaaagaatccctgctggaagacttcaaaggttacctgggttgtcaggctctgtccgaaatgatccagttctacctggaagaagttatgccgcaggctgaaaaccaggacccggacatcaaagctcacgttaactccctgggtgaaaacctgaaaaccctgcgtctgcgtctgcgccgttgccatcgattcctgccgtgcgaaaacggtggcggttctggtggtaaatccaaagctgttgaacaggttaaaaacgctttcaacaaactgcaggaaaaaggtatctacaaagctatgtccgaattcgacatcttcatcaactacatcgaagcttacatgaccatgaaaatccgtaactag

SEQ ID NO: 520 - DNA, 711 bp, synthetic construct; identical to SEQ ID NO: 512
  misc_feature 1..711: note = Synthetic
  source 1..711: mol_type = other DNA

SEQ ID NO: 521 - DNA, 1935 bp, synthetic construct
  misc_feature 1..1935: note = Synthetic
  source 1..1935: mol_type = other DNA
atggacatgagggtgcccgctcagctcctggggctcctgctgctgtggctgagaggtgcgcgctgtcaggtgcagctggtgcagtctggggctgaggtgaagaagcctggggcctcagtgaaggtgtcctgcaaggcttctggatacaccttcaccagatatgatatcaactgggtgcgacaggccactggacaaggacttgagtggatgggatggatgaaccctaacagtggtaactcaggctctgtacagaagttccggggcagagtcaccatgaccagggacacctccatccacatcgcctacatggaactgagcagcctgagatctgaggacacggccgtgtattactgtgcgagaggcgggtataccagcagctggcggtggtacttcgatctctggggccgtggcaccctggtcactgtctcctcagcctccaccaagggcccatcggtcttccccctggcaccctcctccaagagcacctctgggggcacagcggccctgggctgcctggtcaaggactacttccccgaaccggtgacggtgtcgtggaactcaggcgccctgaccagcggcgtgcacaccttcccggctgtcctacagtcctcaggactctactccctcagcagcgtggtgaccgtgccctccagcagcttgggcacccagacctacatctgcaacgtgaatcacaagcccagcaacaccaaggtggacaagaaagttgagcccaaatcttgtgacaaaactcacacatgcccaccgtgcccagcacctgaactcctggggggaccgtcagtcttcctcttccccccaaaacccaaggacaccctcatgatctcccggacccctgaggtcacatgcgtggtggtggacgtgagccacgaagaccctgaggtcaagttcaactggtacgtggacggcgtggaggtgcataatgccaagacaaagccgtgcgaggagcagtacggcagcacgtaccgttgcgtcagcgtcctcaccgtcctgcaccaggactggctgaatggcaaggagtacaagtgcaaggtgtccaacaaagccctcccagcccccatcgagaaaaccatctccaaagccaaagggcagccccgagaaccacaggtgtacaccctgcccccatcccgggaggagatgaccaagaaccaggtcagcctgacctgcctggtcaaaggcttctatcccagcgacatcgccgtggagtgggagagcaatgggcagccggagaacaactacaagaccacgcctcccgtgctggactccgacggctccttcttcctctatagcaagctcaccgtggacaagagcaggtggcagcaggggaacgtcttctcatgctccgtgatgcatgaggctctgcacaaccactacacgcagaagagcctctccctgtctcccgggggaggcggtggatcctctccaggtcaaggtactcaatccgaaaactcctgcacccacttcccgggtaacctgccgaacatgctgcgtgacctgcgtgacgctttctcccgtgttaaaaccttcttccagatgaaagaccagctggacaacaagctgctgaaagaatccctgctggaagacttcaaaggttacctgggttgtcaggctctgtccgaaatgatccagttctacctggaagaagttatgccgcaggctgaaaaccaggacccggacatcaaagctcacgttaactccctgggtgaaaacctgaaaaccctgcgtctgcgtctgcgccgttgccatcgattcctgccgtgcgaaaacggtggcggttctggtggtaaatccaaagctgttgaacaggttaaaaacgctttcaacaaactgcaggaaaaaggtatctacaaagctatgtccgaattcgacatcttcatcaactacatcgaagcttacatgaccatgaaaatccgtaactag

SEQ ID NO: 522 - DNA, 711 bp, synthetic construct; identical to SEQ ID NO: 512
  misc_feature 1..711: note = Synthetic
  source 1..711: mol_type = other DNA

SEQ ID NO: 523 - DNA, 1935 bp, synthetic construct
  misc_feature 1..1935: note = Synthetic
  source 1..1935: mol_type = other DNA
atggacatgagggtgcccgctcagctcctggggctcctgctgctgtggctgagaggtgcgcgctgtcaggtgcagctggtgcagtctggggctgaggtgaagaagcctggggcctcagtgaaggtgtcctgcaaggcttctggatacaccttcaccagatatgatatcaactgggtgcgacaggccactggacaaggacttgagtggatgggatggatgaaccctaacagtggtaactcaggctctgtacagaagttccggggcagagtcaccatgaccagggacacctccatccacatcgcctacatggaactgagcagcctgagatctgaggacacggccgtgtattactgtgcgagaggcgggtataccagcagctggcggtggtacttcgatctctggggccgtggcaccctggtcactgtctcctcagcctccaccaagggcccatcggtcttccccctggcaccctcctccaagagcacctctgggggcacagcggccctgggctgcctggtcaaggactacttccccgaaccggtgacggtgtcgtggaactcaggcgccctgaccagcggcgtgcacaccttcccggctgtcctacagtcctcaggactctactccctcagcagcgtggtgaccgtgccctccagcagcttgggcacccagacctacatctgcaacgtgaatcacaagcccagcaacaccaaggtggacaagaaagttgagcccaaatcttgtgacaaaactcacacatgcccaccgtgcccagcacctgaactcctggggggaccgtcagtcttcctcttccccccaaaacccaaggacaccctcatgatctcccggacccctgaggtcacatgcgtggtggtggacgtgagccacgaagaccctgaggtcaagttcaactggtacgtggacggcgtggaggtgcataatgccaagacaaagccgtgcgaggagcagtacggcagcacgtaccgttgcgtcagcgtcctcaccgtcctgcaccaggactggctgaatggcaaggagtacaagtgcaaggtgtccaacaaagccctcccagcccccatcgagaaaaccatctccaaagccaaagggcagccccgagaaccacaggtgtacaccctgcccccatcccgggaggagatgaccaagaaccaggtcagcctgacctgcctggtcaaaggcttctatcccagcgacatcgccgtggagtgggagagcaatgggcagccggagaacaactacaagaccacgcctcccgtgctggactccgacggctccttcttcctctatagcaagctcaccgtggacaagagcaggtggcagcaggggaacgtcttctcatgctccgtgatgcatgaggctctgcacaaccactacacgcagaagagcctctccctgtctcccgggggaggcggtggatcctctccaggtcaaggtactcaatccgaaaactcctgcacccacttcccgggtaacctgccgaacatgctgcgtgacctgcgtgacgctttctcccgtgttgacaccttcttccagatgaaagaccagctggacaacctgctgctgaaagaatccctgctggaagacttcaaaggttacctgggttgtcaggctctgtccgaaatgatccagttctacctggaagaagttatgccgcaggctgaaaaccaggacccggacatcaaagctcacgttaactccctgggtgaaaacctgaaaaccctgcgtctgcgtctgcgccgttgccatcgattcctgccgtgcgaaaacggtggcggttctggtggtaaatccaaagctgttgaacaggttaaaaacgctttcaacaaactgcaggaaaaaggtatctacaaagctatgtccgaattcgacatcttcatcaactacatcgaagcttacatgaccatgaaaatccgtaactag

SEQ ID NO: 524 - DNA, 711 bp, synthetic construct; identical to SEQ ID NO: 512
  misc_feature 1..711: note = Synthetic
  source 1..711: mol_type = other DNA

SEQ ID NO: 525 - DNA, 1935 bp, synthetic construct
  misc_feature 1..1935: note = Synthetic
  source 1..1935: mol_type = other DNA
atggacatgagggtgcccgctcagctcctggggctcctgctgctgtggctgagaggtgcgcgctgtcaggtgcagctggtgcagtctggggctgaggtgaagaagcctggggcctcagtgaaggtgtcctgcaaggcttctggatacaccttcaccagatatgatatcaactgggtgcgacaggccactggacaaggacttgagtggatgggatggatgaaccctaacagtggtaactcaggctctgtacagaagttccggggcagagtcaccatgaccagggacacctccatccacatcgcctacatggaactgagcagcctgagatctgaggacacggccgtgtattactgtgcgagaggcgggtataccagcagctggcggtggtacttcgatctctggggccgtggcaccctggtcactgtctcctcagcctccaccaagggcccatcggtcttccccctggcaccctcctccaagagcacctctgggggcacagcggccctgggctgcctggtcaaggactacttccccgaaccggtgacggtgtcgtggaactcaggcgccctgaccagcggcgtgcacaccttcccggctgtcctacagtcctcaggactctactccctcagcagcgtggtgaccgtgccctccagcagcttgggcacccagacctacatctgcaacgtgaatcacaagcccagcaacaccaaggtggacaagaaagttgagcccaaatcttgtgacaaaactcacacatgcccaccgtgcccagcacctgaactcctggggggaccgtcagtcttcctcttccccccaaaacccaaggacaccctcatgatctcccggacccctgaggtcacatgcgtggtggtggacgtgagccacgaagaccctgaggtcaagttcaactggtacgtggacggcgtggaggtgcataatgccaagacaaagccgtgcgaggagcagtacggcagcacgtaccgttgcgtcagcgtcctcaccgtcctgcaccaggactggctgaatggcaaggagtacaagtgcaaggtgtccaacaaagccctcccagcccccatcgagaaaaccatctccaaagccaaagggcagccccgagaaccacaggtgtacaccctgcccccatcccgggaggagatgaccaagaaccaggtcagcctgacctgcctggtcaaaggcttctatcccagcgacatcgccgtggagtgggagagcaatgggcagccggagaacaactacaagaccacgcctcccgtgctggactccgacggctccttcttcctctatagcaagctcaccgtggacaagagcaggtggcagcaggggaacgtcttctcatgctccgtgatgcatgaggctctgcacaaccactacacgcagaagagcctctccctgtctcccgggggaggcggtggatcctctccaggtcaaggtactcaatccgaaaactcctgcacccacttcccgggtaacctgccgaacatgctgcgtgacctgcgtgacgctttctcccgtgttaaaaccttcttcgagatgaaagaccagctggacaacctgctgctgaaagaatccctgctggaagacttcaaaggttacctgggttgtcaggctctgtccgaaatgatccagttctacctggaagaagttatgccgcaggctgaaaaccaggacccggacatcaaagctcacgttaactccctgggtgaaaacctgaaaaccctgcgtctgcgtctgcgccgttgccatcgattcctgccgtgcgaaaacggtggcggttctggtggtaaatccaaagctgttgaacaggttaaaaacgctttcaacaaactgcaggaaaaaggtatctacaaagctatgtccgaattcgacatcttcatcaactacatcgaagcttacatgaccatgaaaatccgtaactag

SEQ ID NO: 526 - DNA, 711 bp, synthetic construct; identical to SEQ ID NO: 512
  misc_feature 1..711: note = Synthetic
  source 1..711: mol_type = other DNA

SEQ ID NO: 527 - DNA, 1926 bp, synthetic construct
  misc_feature 1..1926: note = Synthetic
  source 1..1926: mol_type = other DNA
atggacatgagggtgcccgctcagctcctggggctcctgctgctgtggctgagaggtgcgcgctgtgaggtgcaggtgttggagtctgggggaggcttggtacagcctggggagtccctgagactctcctgtacagcctctggattcacctttaacgcctatgccatgagctgggtccgccaggctccagggaaggggctggagtgggtgtcaactattagtggtagtggtagtaccacatactacgcagactccgtgaagggccggttcaccatctccagagacaattccaagaacacgctggatctgcaaatgaacagcctgagagccgcggacacggccgtatattactgtgcgaaagttgctggaagtaactttttctttgaccactggggccagggaaccctggttaccgtgtcctcagcctccaccaagggcccatcggtcttccccctggcaccctcctccaagagcacctctgggggcacagcggccctgggctgcctggtcaaggactacttccccgaaccggtgacggtgtcgtggaactcaggcgccctgaccagcggcgtgcacaccttcccggctgtcctacagtcctcaggactctactccctcagcagcgtggtgaccgtgccctccagcagcttgggcacccagacctacatctgcaacgtgaatcacaagcccagcaacaccaaggtggacaagaaagttgagcccaaatcttgtgacaaaactcacacatgcccaccgtgcccagcacctgaactcctggggggaccgtcagtcttcctcttccccccaaaacccaaggacaccctcatgatctcccggacccctgaggtcacatgcgtggtggtggacgtgagccacgaagaccctgaggtcaagttcaactggtacgtggacggcgtggaggtgcataatgccaagacaaagccgtgcgaggagcagtacggcagcacgtaccgttgcgtcagcgtcctcaccgtcctgcaccaggactggctgaatggcaaggagtacaagtgcaaggtgtccaacaaagccctcccagcccccatcgagaaaaccatctccaaagccaaagggcagccccgagaaccacaggtgtacaccctgcccccatcccggaaggagatgaccaagaaccaggtcagcctgacctgcctggtcaaaggcttctatcccagcgacatcgccgtggagtgggagagcaatgggcagccggagaacaactacaagaccacgcctcccgtgctgaagtccgacggctccttcttcctctatagcaagctcaccgtggacaagagcaggtggcagcaggggaacgtcttctcatgctccgtgatgcatgaggctctgcacaaccactacacgcagaagagcctctccctgtctcccgggggaggcggtggatcctctccaggtcaaggtactcaatccgaaaactcctgcacccacttcccgggtaacctgccgaacatgctgcgtgacctgcttgacgctttctcccgtgttaaaaccttcttccagatgaaagaccagctggacaacctgctgctgaaagaatccctgctggaagacttcaaaggttacctgggttgtcaggctctgtccgaaatgatccagttctacctggaagaagttatgccgcaggctgaaaaccaggacccggacatcaaagctcacgttaactccctgggtgaaaacctgaaaaccctgcgtctgcgtctgcgccgttgccatcgattcctgccgtgcgaaaacggtggcggttctggtggtaaatccaaagctgttgaacaggttaaaaacgctttcaacaaactgcaggaaaaaggtatctacaaagctatgtccgaattcgacatcttcatcaactacatcgaagcttacatgaccatgaaaatccgtaactag

SEQ ID NO: 528 - DNA, 714 bp, synthetic construct; identical to SEQ ID NO: 304
  misc_feature 1..714: note = Synthetic
  source 1..714: mol_type = other DNA

SEQ ID NO: 529 - DNA, 1260 bp, synthetic construct
  misc_feature 1..1260: note = Synthetic
  source 1..1260: mol_type = other DNA
atggacatgagggtgcccgctcagctcctggggctcctgctgctgtggctgagaggtgcgcgctgtgacaaaactcacacatgcccaccgtgcccagcacctgaactcctggggggaccgtcagtcttcctcttccccccaaaacccaaggacaccctcatgatctcccggacccctgaggtcacatgcgtggtggtggacgtgagccacgaagaccctgaggtcaagttcaactggtacgtggacggcgtggaggtgcataatgccaagacaaagccgtgcgaggagcagtacggcagcacgtaccgttgcgtcagcgtcctcaccgtcctgcaccaggactggctgaatggcaaggagtacaagtgcaaggtgtccaacaaagccctcccagcccccatcgagaaaaccatctccaaagccaaagggcagccccgagaaccacaggtgtacaccctgcccccatcccgggaggagatgaccaagaaccaggtcagcctgacctgcctggtcaaaggcttctatcccagcgacatcgccgtggagtgggagagcaatgggcagccggagaacaactacgacaccacgcctcccgtgctggactccgacggctccttcttcctctatagcgacctcaccgtggacaagagcaggtggcagcaggggaacgtcttctcatgctccgtgatgcatgaggctctgcacaaccactacacgcaggacagcctctccctgtctcccgggggaggcggtggatcctctccaggtcaaggtactcaatccgaaaactcctgcacccacttcccgggtaacctgccgaacatgctgcgtgacctgcttgacgctttctcccgtgttaaaaccttcttccagatgaaagaccagctggacaacctgctgctgaaagaatccctgctggaagacttcaaaggttacctgggttgtcaggctctgtccgaaatgatccagttctacctggaagaagttatgccgcaggctgaaaaccaggacccggacatcaaagctcacgttaactccctgggtgaaaacctgaaaaccctgcgtctgcgtctgcgccgttgccatcgattcctgccgtgcgaaaacggtggcggttctggtggtaaatccaaagctgttgaacaggttaaaaacgctttcaacaaactgcaggaaaaaggtatctacaaagctatgtccgaattcgacatcttcatcaactacatcgaagcttacatgaccatgaaaatccgtaactag

SEQ ID NO: 530 - DNA, 1926 bp, synthetic construct
  misc_feature 1..1926: note = Synthetic
  source 1..1926: mol_type = other DNA
atggacatgagggtgcccgctcagctcctggggctcctgctgctgtggctgagaggtgcgcgctgtgaggtgcaggtgttggagtctgggggaggcttggtacagcctggggagtccctgagactctcctgtacagcctctggattcacctttaacgcctatgccatgagctgggtccgccaggctccagggaaggggctggagtgggtgtcaactattagtggtagtggtagtaccacatactacgcagactccgtgaagggccggttcaccatctccagagacaattccaagaacacgctggatctgcaaatgaacagcctgagagccgcggacacggccgtatattactgtgcgaaagttgctggaagtaactttttctttgaccactggggccagggaaccctggttaccgtgtcctcagcctccaccaagggcccatcggtcttccccctggcaccctcctccaagagcacctctgggggcacagcggccctgggctgcctggtcaaggactacttccccgaaccggtgacggtgtcgtggaactcaggcgccctgaccagcggcgtgcacaccttcccggctgtcctacagtcctcaggactctactccctcagcagcgtggtgaccgtgccctccagcagcttgggcacccagacctacatctgcaacgtgaatcacaagcccagcaacaccaaggtggacaagaaagttgagcccaaatcttgtgacaaaactcacacatgcccaccgtgcccagcacctgaactcctggggggaccgtcagtcttcctcttccccccaaaacccaaggacaccctcatgatctcccggacccctgaggtcacatgcgtggtggtggacgtgagccacgaagaccctgaggtcaagttcaactggtacgtggacggcgtggaggtgcataatgccaagacaaagccgtgcgaggagcagtacggcagcacgtaccgttgcgtcagcgtcctcaccgtcctgcaccaggactggctgaatggcaaggagtacaagtgcaaggtgtccaacaaagccctcccagcccccatcgagaaaaccatctccaaagccaaagggcagccccgagaaccacaggtgtacaccctgcccccatcccggaaggagatgaccaagaaccaggtcagcctgacctgcctggtcaaaggcttctatcccagcgacatcgccgtggagtgggagagcaatgggcagccggagaacaactacaagaccacgcctcccgtgctgaagtccgacggctccttcttcctctatagcaagctcaccgtggacaagagcaggtggcagcaggggaacgtcttctcatgctccgtgatgcatgaggctctgcacaaccactacacgcagaagagcctctccctgtctcccgggggaggcggtggatcctctccaggtcaaggtactcaatccgaaaactcctgcacccacttcccgggtaacctgccgaacatgctgcgtgacctgcgtgacgctttctcccgtgttaaaaccttcttccagatgaaagaccagctggacaacctgctgctgaaagaatccctgctggaagacttcaaaggttacctgggttgtcaggctctgtccgaaatgatccagttctacctggaagaagttatgccgcaggctgaaaaccaggacccggacatcaaagctcacgttaactccctgggtgaaaacctgaaaaccctgcgtctgcgtctgcgccgttgccatcgattcctgccgtgcgaaaacggtggcggttctggtggtaaatccaaagctgttgaacaggttaaaaacgctttcaacaaactgcaggaaaaaggtatctacttagctatgtccgaattcgacatcttcatcaactacatcgaagcttacatgaccatgaaaatccgtaactag

SEQ ID NO: 531 - DNA, 714 bp, synthetic construct; identical to SEQ ID NO: 304
  misc_feature 1..714: note = Synthetic
  source 1..714: mol_type = other DNA

SEQ ID NO: 532 - DNA, 1260 bp, synthetic construct
  misc_feature 1..1260: note = Synthetic
  source 1..1260: mol_type = other DNA
atggacatgagggtgcccgctcagctcctggggctcctgctgctgtggctgagaggtgcgcgctgtgacaaaactcacacatgcccaccgtgcccagcacctgaactcctggggggaccgtcagtcttcctcttccccccaaaacccaaggacaccctcatgatctcccggacccctgaggtcacatgcgtggtggtggacgtgagccacgaagaccctgaggtcaagttcaactggtacgtggacggcgtggaggtgcataatgccaagacaaagccgtgcgaggagcagtacggcagcacgtaccgttgcgtcagcgtcctcaccgtcctgcaccaggactggctgaatggcaaggagtacaagtgcaaggtgtccaacaaagccctcccagcccccatcgagaaaaccatctccaaagccaaagggcagccccgagaaccacaggtgtacaccctgcccccatcccgggaggagatgaccaagaaccaggtcagcctgacctgcctggtcaaaggcttctatcccagcgacatcgccgtggagtgggagagcaatgggcagccggagaacaactacgacaccacgcctcccgtgctggactccgacggctccttcttcctctatagcgacctcaccgtggacaagagcaggtggcagcaggggaacgtcttctcatgctccgtgatgcatgaggctctgcacaaccactacacgcaggacagcctctccctgtctcccgggggaggcggtggatcctctccaggtcaaggtactcaatccgaaaactcctgcacccacttcccgggtaacctgccgaacatgctgcgtgacctgcgtgacgctttctcccgtgttaaaaccttcttccagatgaaagaccagctggacaacctgctgctgaaagaatccctgctggaagacttcaaaggttacctgggttgtcaggctctgtccgaaatgatccagttctacctggaagaagttatgccgcaggctgaaaaccaggacccggacatcaaagctcacgttaactccctgggtgaaaacctgaaaaccctgcgtctgcgtctgcgccgttgccatcgattcctgccgtgcgaaaacggtggcggttctggtggtaaatccaaagctgttgaacaggttaaaaacgctttcaacaaactgcaggaaaaaggtatctacttagctatgtccgaattcgacatcttcatcaactacatcgaagcttacatgaccatgaaaatccgtaactag

SEQ ID NO: 533 - DNA, 1926 bp, synthetic construct
  misc_feature 1..1926: note = Synthetic
  source 1..1926: mol_type = other DNA
atggacatgagggtgcccgctcagctcctggggctcctgctgctgtggctgagaggtgcgcgctgtgaggtgcaggtgttggagtctgggggaggcttggtacagcctggggagtccctgagactctcctgtacagcctctggattcacctttaacgcctatgccatgagctgggtccgccaggctccagggaaggggctggagtgggtgtcaactattagtggtagtggtagtaccacatactacgcagactccgtgaagggccggttcaccatctccagagacaattccaagaacacgctggatctgcaaatgaacagcctgagagccgcggacacggccgtatattactgtgcgaaagttgctggaagtaactttttctttgaccactggggccagggaaccctggttaccgtgtcctcagcctccaccaagggcccatcggtcttccccctggcaccctcctccaagagcacctctgggggcacagcggccctgggctgcctggtcaaggactacttccccgaaccggtgacggtgtcgtggaactcaggcgccctgaccagcggcgtgcacaccttcccggctgtcctacagtcctcaggactctactccctcagcagcgtggtgaccgtgccctccagcagcttgggcacccagacctacatctgcaacgtgaatcacaagcccagcaacaccaaggtggacaagaaagttgagcccaaatcttgtgacaaaactcacacatgcccaccgtgcccagcacctgaactcctggggggaccgtcagtcttcctcttccccccaaaacccaaggacaccctcatgatctcccggacccctgaggtcacatgcgtggtggtggacgtgagccacgaagaccctgaggtcaagttcaactggtacgtggacggcgtggaggtgcataatgccaagacaaagccgtgcgaggagcagtacggcagcacgtaccgttgcgtcagcgtcctcaccgtcctgcaccaggactggctgaatggcaaggagtacaagtgcaaggtgtccaacaaagccctcccagcccccatcgagaaaaccatctccaaagccaaagggcagccccgagaaccacaggtgtacaccctgcccccatcccggaaggagatgaccaagaaccaggtcagcctgacctgcctggtcaaaggcttctatcccagcgacatcgccgtggagtgggagagcaatgggcagccggagaacaactacaagaccacgcctcccgtgctgaagtccgacggctccttcttcctctatagcaagctcaccgtggacaagagcaggtggcagcaggggaacgtcttctcatgctccgtgatgcatgaggctctgcacaaccactacacgcagaagagcctctccctgtctcccgggggaggcggtggatcctctccaggtcaaggtactcaatccgaaaactcctgcacccacttcccgggtaacctgccgaacatgctgcgtgacctgcgtgacgctttctcccgtgttaaaaccttcttccagatgaaagaccagctggacaacctgctgctgaaagaatccctgctggaagacttcaaaggttacctgggttgtcaggctctgtccgaaatgatccagttctacctggaagaagttatgccgcaggctgaaaaccaggacccggacatcaaagctcacgttaactccctgggtgaaaacctgaaaaccctgcgtctgcgtctgcgccgttgccatcgattcctgccgtgcgaaaacggtggcggttctggtggtaaatccaaagctgttgaacaggttaaaaacgctttcaacaaactgcaggaaaaaggtatctacgacgctatgtccgaattcgacatcttcatcaactacatcgaagcttacatgaccatgaaaatccgtaactag

SEQ ID NO: 534 - DNA, 714 bp, synthetic construct; identical to SEQ ID NO: 304
  misc_feature 1..714: note = Synthetic
  source 1..714: mol_type = other DNA

SEQ ID NO: 535 - DNA, 1260 bp, synthetic construct
  misc_feature 1..1260: note = Synthetic
  source 1..1260: mol_type = other DNA
atggacatgagggtgcccgctcagctcctggggctcctgctgctgtggctgagaggtgcgcgctgtgacaaaactcacacatgcccaccgtgcccagcacctgaactcctggggggaccgtcagtcttcctcttccccccaaaacccaaggacaccctcatgatctcccggacccctgaggtcacatgcgtggtggtggacgtgagccacgaagaccctgaggtcaagttcaactggtacgtggacggcgtggaggtgcataatgccaagacaaagccgtgcgaggagcagtacggcagcacgtaccgttgcgtcagcgtcctcaccgtcctgcaccaggactggctgaatggcaaggagtacaagtgcaaggtgtccaacaaagccctcccagcccccatcgagaaaaccatctccaaagccaaagggcagccccgagaaccacaggtgtacaccctgcccccatcccgggaggagatgaccaagaaccaggtcagcctgacctgcctggtcaaaggcttctatcccagcgacatcgccgtggagtgggagagcaatgggcagccggagaacaactacgacaccacgcctcccgtgctggactccgacggctccttcttcctctatagcgacctcaccgtggacaagagcaggtggcagcaggggaacgtcttctcatgctccgtgatgcatgaggctctgcacaaccactacacgcaggacagcctctccctgtctcccgggggaggcggtggatcctctccaggtcaaggtactcaatccgaaaactcctgcacccacttcccgggtaacctgccgaacatgctgcgtgacctgcgtgacgctttctcccgtgttaaaaccttcttccagatgaaagaccagctggacaacctgctgctgaaagaatccctgctggaagacttcaaaggttacctgggttgtcaggctctgtccgaaatgatccagttctacctggaagaagttatgccgcaggctgaaaaccaggacccggacatcaaagctcacgttaactccctgggtgaaaacctgaaaaccctgcgtctgcgtctgcgccgttgccatcgattcctgccgtgcgaaaacggtggcggttctggtggtaaatccaaagctgttgaacaggttaaaaacgctttcaacaaactgcaggaaaaaggtatctacgacgctatgtccgaattcgacatcttcatcaactacatcgaagcttacatgaccatgaaaatccgtaactag

SEQ ID NO: 536 - DNA, 1926 bp, synthetic construct
  misc_feature 1..1926: note = Synthetic
  source 1..1926: mol_type = other DNA
atggacatgagggtgcccgctcagctcctggggctcctgctgctgtggctgagaggtgcgcgctgtgaggtgcaggtgttggagtctgggggaggcttggtacagcctggggagtccctgagactctcctgtacagcctctggattcacctttaacgcctatgccatgagctgggtccgccaggctccagggaaggggctggagtgggtgtcaactattagtggtagtggtagtaccacatactacgcagactccgtgaagggccggttcaccatctccagagacaattccaagaacacgctggatctgcaaatgaacagcctgagagccgcggacacggccgtatattactgtgcgaaagttgctggaagtaactttttctttgaccactggggccagggaaccctggttaccgtgtcctcagcctccaccaagggcccatcggtcttccccctggcaccctcctccaagagcacctctgggggcacagcggccctgggctgcctggtcaaggactacttccccgaaccggtgacggtgtcgtggaactcaggcgccctgaccagcggcgtgcacaccttcccggctgtcctacagtcctcaggactctactccctcagcagcgtggtgaccgtgccctccagcagcttgggcacccagacctacatctgcaacgtgaatcacaagcccagcaacaccaaggtggacaagaaagttgagcccaaatcttgtgacaaaactcacacatgcccaccgtgcccagcacctgaactcctggggggaccgtcagtcttcctcttccccccaaaacccaaggacaccctcatgatctcccggacccctgaggtcacatgcgtggtggtggacgtgagccacgaagaccctgaggtcaagttcaactggtacgtggacggcgtggaggtgcataatgccaagacaaagccgtgcgaggagcagtacggcagcacgtaccgttgcgtcagcgtcctcaccgtcctgcaccaggactggctgaatggcaaggagtacaagtgcaaggtgtccaacaaagccctcccagcccccatcgagaaaaccatctccaaagccaaagggcagccccgagaaccacaggtgtacaccctgcccccatcccggaaggagatgaccaagaaccaggtcagcctgacctgcctggtcaaaggcttctatcccagcgacatcgccgtggagtgggagagcaatgggcagccggagaacaactacaagaccacgcctcccgtgctgaagtccgacggctccttcttcctctatagcaagctcaccgtggacaagagcaggtggcagcaggggaacgtcttctcatgctccgtgatgcatgaggctctgcacaaccactacacgcagaagagcctctccctgtctcccgggggaggcggtggatcctctccaggtcaaggtactcaatccgaaaactcctgcacccacttcccgggtaacctgccgaacatgctgcgtgacctgcgtgacgctttctcccgtgttaaaaccttcttccagatgaaaggccagctggacaacctgctgctgaaagaatccctgctggaagacttcaaaggttacctgggttgtcaggctctgtccgaaatgatccagttctacctggaagaagttatgccgcaggctgaaaaccaggacccggacatcaaagctcacgttaactccctgggtgaaaacctgaaaaccctgcgtctgcgtctgcgccgttgccatcgattcctgccgtgcgaaaacggtggcggttctggtggtaaatccaaagctgttgaacaggttaaaaacgctttcaacaaactgcaggaaaaaggtatctacaaagctatgtccgaattcgacatcttcatcaactacatcgaagcttacatgaccatgaaaatccgtaactag

SEQ ID NO: 537 - DNA, 714 bp, synthetic construct; identical to SEQ ID NO: 304
  misc_feature 1..714: note = Synthetic
  source 1..714: mol_type = other DNA

SEQ ID NO: 538 - DNA, 1260 bp, synthetic construct
  misc_feature 1..1260: note = Synthetic
  source 1..1260: mol_type = other DNA
atggacatgagggtgcccgctcagctcctggggctcctgctgctgtggctgagaggtgcgcgctgtgacaaaactcacacatgcccaccgtgcccagcacctgaactcctggggggaccgtcagtcttcctcttccccccaaaacccaaggacaccctcatgatctcccggacccctgaggtcacatgcgtggtggtggacgtgagccacgaagaccctgaggtcaagttcaactggtacgtggacggcgtggaggtgcataatgccaagacaaagccgtgcgaggagcagtacggcagcacgtaccgttgcgtcagcgtcctcaccgtcctgcaccaggactggctgaatggcaaggagtacaagtgcaaggtgtccaacaaagccctcccagcccccatcgagaaaaccatctccaaagccaaagggcagccccgagaaccacaggtgtacaccctgcccccatcccgggaggagatgaccaagaaccaggtcagcctgacctgcctggtcaaaggcttctatcccagcgacatcgccgtggagtgggagagcaatgggcagccggagaacaactacgacaccacgcctcccgtgctggactccgacggctccttcttcctctatagcgacctcaccgtggacaagagcaggtggcagcaggggaacgtcttctcatgctccgtgatgcatgaggctctgcacaaccactacacgcaggacagcctctccctgtctcccgggggaggcggtggatcctctccaggtcaaggtactcaatccgaaaactcctgcacccacttcccgggtaacctgccgaacatgctgcgtgacctgcgtgacgctttctcccgtgttaaaaccttcttccagatgaaaggccagctggacaacctgctgctgaaagaatccctgctggaagacttcaaaggttacctgggttgtcaggctctgtccgaaatgatccagttctacctggaagaagttatgccgcaggctgaaaaccaggacccggacatcaaagctcacgttaactccctgggtgaaaacctgaaaaccctgcgtctgcgtctgcgccgttgccatcgattcctgccgtgcgaaaacggtggcggttctggtggtaaatccaaagctgttgaacaggttaaaaacgctttcaacaaactgcaggaaaaaggtatctacaaagctatgtccgaattcgacatcttcatcaactacatcgaagcttacatgaccatgaaaatccgtaactag

SEQ ID NO: 539 - DNA, 1926 bp, synthetic construct
  misc_feature 1..1926: note = Synthetic
  source 1..1926: mol_type = other DNA
atggacatgagggtgcccgctcagctcctggggctcctgctgctgtggctgagaggtgcgcgctgtgaggtgcaggtgttggagtctgggggaggcttggtacagcctggggagtccctgagactctcctgtacagcctctggattcacctttaacgcctatgccatgagctgggtccgccaggctccagggaaggggctggagtgggtgtcaactattagtggtagtggtagtaccacatactacgcagactccgtgaagggccggttcaccatctccagagacaattccaagaacacgctggatctgcaaatgaacagcctgagagccgcggacacggccgtatattactgtgcgaaagttgctggaagtaactttttctttgaccactggggccagggaaccctggttaccgtgtcctcagcctccaccaagggcccatcggtcttccccctggcaccctcctccaagagcacctctgggggcacagcggccctgggctgcctggtcaaggactacttccccgaaccggtgacggtgtcgtggaactcaggcgccctgaccagcggcgtgcacaccttcccggctgtcctacagtcctcaggactctactccctcagcagcgtggtgaccgtgccctccagcagcttgggcacccagacctacatctgcaacgtgaatcacaagcccagcaacaccaaggtggacaagaaagttgagcccaaatcttgtgacaaaactcacacatgcccaccgtgcccagcacctgaactcctggggggaccgtcagtcttcctcttccccccaaaacccaaggacaccctcatgatctcccggacccctgaggtcacatgcgtggtggtggacgtgagccacgaagaccctgaggtcaagttcaactggtacgtggacggcgtggaggtgcataatgccaagacaaagccgtgcgaggagcagtacggcagcacgtaccgttgcgtcagcgtcctcaccgtcctgcaccaggactggctgaatggcaaggagtacaagtgcaaggtgtccaacaaagccctcccagcccccatcgagaaaaccatctccaaagccaaagggcagccccgagaaccacaggtgtacaccctgcccccatcccggaaggagatgaccaagaaccaggtcagcctgacctgcctggtcaaaggcttctatcccagcgacatcgccgtggagtgggagagcaatgggcagccggagaacaactacaagaccacgcctcccgtgctgaagtccgacggctccttcttcctctatagcaagctcaccgtggacaagagcaggtggcagcaggggaacgtcttctcatgctccgtgatgcatgaggctctgcacaaccactacacgcagaagagcctctccctgtctcccgggggaggcggtggatcctctccaggtcaaggtactcaatccgaaaactcctgcacccacttcccgggtaacctgccgaacatgctgcgtgacctgcgtgacgctttctcccgtgttaaaaccttcttccggatgaaagaccagctggacaacctgctgctgaaagaatccctgctggaagacttcaaaggttacctgggttgtcaggctctgtccgaaatgatccagttctacctggaagaagttatgccgcaggctgaaaaccaggacccggacatcaaagctcacgttaactccctgggtgaaaacctgaaaaccctgcgtctgcgtctgcgccgttgccatcgattcctgccgtgcgaaaacggtggcggttctggtggtaaatccaaagctgttgaacaggttaaaaacgctttcaacaaactgcaggaaaaaggtatctacaaagctatgtccgaattcgacatcttcatcaactacatcgaagcttacatgaccatgaaaatccgtaactag

SEQ ID NO: 540 - DNA, 714 bp, synthetic construct; identical to SEQ ID NO: 304
  misc_feature 1..714: note = Synthetic
  source 1..714: mol_type = other DNA

SEQ ID NO: 541 - DNA, 1260 bp, synthetic construct
  misc_feature 1..1260: note = Synthetic
  source 1..1260: mol_type = other DNA
atggacatgagggtgcccgctcagctcctggggctcctgctgctgtggctgagaggtgcgcgctgtgacaaaactcacacatgcccaccgtgcccagcacctgaactcctggggggaccgtcagtcttcctcttccccccaaaacccaaggacaccctcatgatctcccggacccctgaggtcacatgcgtggtggtggacgtgagccacgaagaccctgaggtcaagttcaactggtacgtggacggcgtggaggtgcataatgccaagacaaagccgtgcgaggagcagtacggcagcacgtaccgttgcgtcagcgtcctcaccgtcctgcaccaggactggctgaatggcaaggagtacaagtgcaaggtgtccaacaaagccctcccagcccccatcgagaaaaccatctccaaagccaaagggcagccccgagaaccacaggtgtacaccctgcccccatcccgggaggagatgaccaagaaccaggtcagcctgacctgcctggtcaaaggcttctatcccagcgacatcgccgtggagtgggagagcaatgggcagccggagaacaactacgacaccacgcctcccgtgctggactccgacggctccttcttcctctatagcgacctcaccgtggacaagagcaggtggcagcaggggaacgtcttctcatgctccgtgatgcatgaggctctgcacaaccactacacgcaggacagcctctccctgtctcccgggggaggcggtggatcctctccaggtcaaggtactcaatccgaaaactcctgcacccacttcccgggtaacctgccgaacatgctgcgtgacctgcgtgacgctttctcccgtgttaaaaccttcttccggatgaaagaccagctggacaacctgctgctgaaagaatccctgctggaagacttcaaaggttacctgggttgtcaggctctgtccgaaatgatccagttctacctggaagaagttatgccgcaggctgaaaaccaggacccggacatcaaagctcacgttaactccctgggtgaaaacctgaaaaccctgcgtctgcgtctgcgccgttgccatcgattcctgccgtgcgaaaacggtggcggttctggtggtaaatccaaagctgttgaacaggttaaaaacgctttcaacaaactgcaggaaaaaggtatctacaaagctatgtccgaattcgacatcttcatcaactacatcgaagcttacatgaccatgaaaatccgtaactag

SEQ ID NO: 542 - DNA, 1926 bp, synthetic construct
  misc_feature 1..1926: note = Synthetic
  source 1..1926: mol_type = other DNA
atggacatgagggtgcccgctcagctcctggggctcctgctgctgtggctgagaggtgcgcgctgtgaggtgcaggtgttggagtctgggggaggcttggtacagcctggggagtccctgagactctcctgtacagcctctggattcacctttaacgcctatgccatgagctgggtccgccaggctccagggaaggggctggagtgggtgtcaactattagtggtagtggtagtaccacatactacgcagactccgtgaagggccggttcaccatctccagagacaattccaagaacacgctggatctgcaaatgaacagcctgagagccgcggacacggccgtatattactgtgcgaaagttgctggaagtaactttttctttgaccactggggccagggaaccctggttaccgtgtcctcagcctccaccaagggcccatcggtcttccccctggcaccctcctccaagagcacctctgggggcacagcggccctgggctgcctggtcaaggactacttccccgaaccggtgacggtgtcgtggaactcaggcgccctgaccagcggcgtgcacaccttcccggctgtcctacagtcctcaggactctactccctcagcagcgtggtgaccgtgccctccagcagcttgggcacccagacctacatctgcaacgtgaatcacaagcccagcaacaccaaggtggacaagaaagttgagcccaaatcttgtgacaaaactcacacatgcccaccgtgcccagcacctgaactcctggggggaccgtcagtcttcctcttccccccaaaacccaaggacaccctcatgatctcccggacccctgaggtcacatgcgtggtggtggacgtgagccacgaagaccctgaggtcaagttcaactggtacgtggacggcgtggaggtgcataatgccaagacaaagccgtgcgaggagcagtacggcagcacgtaccgttgcgtcagcgtcctcaccgtcctgcaccaggactggctgaatggcaaggagtacaagtgcaaggtgtccaacaaagccctcccagcccccatcgagaaaaccatctccaaagccaaagggcagccccgagaaccacaggtgtacaccctgcccccatcccggaaggagatgaccaagaaccaggtcagcctgacctgcctggtcaaaggcttctatcccagcgacatcgccgtggagtgggagagcaatgggcagccggagaacaactacaagaccacgcctcccgtgctgaagtccgacggctccttcttcctctatagcaagctcaccgtggacaagagcaggtggcagcaggggaacgtcttctcatgctccgtgatgcatgaggctctgcacaaccactacacgcagaagagcctctccctgtctcccgggggaggcggtggatcctctccaggtcaaggtactcaatccgaaaactcctgcacccacttcccgggtaacctgccgaacatgctgcgtgacctgcgtgacgctttctcccgtgttaaaaccttcttccagatgaaagaccagctggacaacaagctgctgaaagaatccctgctggaagacttcaaaggttacctgggttgtcaggctctgtccgaaatgatccagttctacctggaagaagttatgccgcaggctgaaaaccaggacccggacatcaaagctcacgttaactccctgggtgaaaacctgaaaaccctgcgtctgcgtctgcgccgttgccatcgattcctgccgtgcgaaaacggtggcggttctggtggtaaatccaaagctgttgaacaggttaaaaacgctttcaacaaactgcaggaaaaaggtatctacaaagctatgtccgaattcgacatcttcatcaactacatcgaagcttacatgaccatgaaaatccgtaactag

SEQ ID NO: 543 - DNA, 714 bp, synthetic construct; identical to SEQ ID NO: 304
  misc_feature 1..714: note = Synthetic
  source 1..714: mol_type = other DNA

SEQ ID NO: 544 - DNA, 1260 bp, synthetic construct
  misc_feature 1..1260: note = Synthetic
  source 1..1260: mol_type = other DNA
atggacatgagggtgcccgctcagctcctggggctcctgctgctgtggctgagaggtgcgcgctgtgacaaaactcacacatgcccaccgtgcccagcacctgaactcctggggggaccgtcagtcttcctcttccccccaaaacccaaggacaccctcatgatctcccggacccctgaggtcacatgcgtggtggtggacgtgagccacgaagaccctgaggtcaagttcaactggtacgtggacggcgtggaggtgcataatgccaagacaaagccgtgcgaggagcagtacggcagcacgtaccgttgcgtcagcgtcctcaccgtcctgcaccaggactggctgaatggcaaggagtacaagtgcaaggtgtccaacaaagccctcccagcccccatcgagaaaaccatctccaaagccaaagggcagccccgagaaccacaggtgtacaccctgcccccatcccgggaggagatgaccaagaaccaggtcagcctgacctgcctggtcaaaggcttctatcccagcgacatcgccgtggagtgggagagcaatgggcagccggagaacaactacgacaccacgcctcccgtgctggactccgacggctccttcttcctctatagcgacctcaccgtggacaagagcaggtggcagcaggggaacgtcttctcatgctccgtgatgcatgaggctctgcacaaccactacacgcaggacagcctctccctgtctcccgggggaggcggtggatcctctccaggtcaaggtactcaatccgaaaactcctgcacccacttcccgggtaacctgccgaacatgctgcgtgacctgcgtgacgctttctcccgtgttaaaaccttcttccagatgaaagaccagctggacaacaagctgctgaaagaatccctgctggaagacttcaaaggttacctgggttgtcaggctctgtccgaaatgatccagttctacctggaagaagttatgccgcaggctgaaaaccaggacccggacatcaaagctcacgttaactccctgggtgaaaacctgaaaaccctgcgtctgcgtctgcgccgttgccatcgattcctgccgtgcgaaaacggtggcggttctggtggtaaatccaaagctgttgaacaggttaaaaacgctttcaacaaactgcaggaaaaaggtatctacaaagctatgtccgaattcgacatcttcatcaactacatcgaagcttacatgaccatgaaaatccgtaactag

SEQ ID NO: 545 - DNA, 1926 bp, synthetic construct
  misc_feature 1..1926: note = Synthetic
  source 1..1926: mol_type = other DNA
atggacatgagggtgcccgctcagctcctggggctcctgctgctgtggctgagaggtgcgcgctgtgaggtgcaggtgttggagtctgggggaggcttggtacagcctggggagtccctgagactctcctgtacagcctctggattcacctttaacgcctatgccatgagctgggtccgccaggctccagggaaggggctggagtgggtgtcaactattagtggtagtggtagtaccacatactacgcagactccgtgaagggccggttcaccatctccagagacaattccaagaacacgctggatctgcaaatgaacagcctgagagccgcggacacggccgtatattactgtgcgaaagttgctggaagtaactttttctttgaccactggggccagggaaccctggttaccgtgtcctcagcctccaccaagggcccatcggtcttccccctggcaccctcctccaagagcacctctgggggcacagcggccctgggctgcctggtcaaggactacttccccgaaccggtgacggtgtcgtggaactcaggcgccctgaccagcggcgtgcacaccttcccggctgtcctacagtcctcaggactctactccctcagcagcgtggtgaccgtgccctccagcagcttgggcacccagacctacatctgcaacgtgaatcacaagcccagcaacaccaaggtggacaagaaagttgagcccaaatcttgtgacaaaactcacacatgcccaccgtgcccagcacctgaactcctggggggaccgtcagtcttcctcttccccccaaaacccaaggacaccctcatgatctcccggacccctgaggtcacatgcgtggtggtggacgtgagccacgaagaccctgaggtcaagttcaactggtacgtggacggcgtggaggtgcataatgccaagacaaagccgtgcgaggagcagtacggcagcacgtaccgttgcgtcagcgtcctcaccgtcctgcaccaggactggctgaatggcaaggagtacaagtgcaaggtgtccaacaaagccctcccagcccccatcgagaaaaccatctccaaagccaaagggcagccccgagaaccacaggtgtacaccctgcccccatcccggaaggagatgaccaagaaccaggtcagcctgacctgcctggtcaaaggcttctatcccagcgacatcgccgtggagtgggagagcaatgggcagccggagaacaactacaagaccacgcctcccgtgctgaagtccgacggctccttcttcctctatagcaagctcaccgtggacaagagcaggtggcagcaggggaacgtcttctcatgctccgtgatgcatgaggctctgcacaaccactacacgcagaagagcctctccctgtctcccgggggaggcggtggatcctctccaggtcaaggtactcaatccgaaaactcctgcacccacttcccgggtaacctgccgaacatgctgcgtgacctgcgtgacgctttctcccgtgttgacaccttcttccagatgaaagaccagctggacaacctgctgctgaaagaatccctgctggaagacttcaaaggttacctgggttgtcaggctctgtccgaaatgatccagttctacctggaagaagttatgccgcaggctgaaaaccaggacccggacatcaaagctcacgttaactccctgggtgaaaacctgaaaaccctgcgtctgcgtctgcgccgttgccatcgattcctgccgtgcgaaaacggtggcggttctggtggtaaatccaaagctgttgaacaggttaaaaacgctttcaacaaactgcaggaaaaaggtatctacaaagctatgtccgaattcgacatcttcatcaactacatcgaagcttacatgaccatgaaaatccgtaactag

SEQ ID NO: 546 - DNA, 714 bp, synthetic construct; identical to SEQ ID NO: 304
  misc_feature 1..714: note = Synthetic
  source 1..714: mol_type = other DNA

SEQ ID NO: 547 - DNA, 1260 bp, synthetic construct
  misc_feature 1..1260: note = Synthetic
  source 1..1260: mol_type = other DNA
atggacatgagggtgcccgctcagctcctggggctcctgctgctgtggctgagaggtgcgcgctgtgacaaaactcacacatgcccaccgtgcccagcacctgaactcctggggggaccgtcagtcttcctcttccccccaaaacccaaggacaccctcatgatctcccggacccctgaggtcacatgcgtggtggtggacgtgagccacgaagaccctgaggtcaagttcaactggtacgtggacggcgtggaggtgcataatgccaagacaaagccgtgcgaggagcagtacggcagcacgtaccgttgcgtcagcgtcctcaccgtcctgcaccaggactggctgaatggcaaggagtacaagtgcaaggtgtccaacaaagccctcccagcccccatcgagaaaaccatctccaaagccaaagggcagccccgagaaccacaggtgtacaccctgcccccatcccgggaggagatgaccaagaaccaggtcagcctgacctgcctggtcaaaggcttctatcccagcgacatcgccgtggagtgggagagcaatgggcagccggagaacaactacgacaccacgcctcccgtgctggactccgacggctccttcttcctctatagcgacctcaccgtggacaagagcaggtggcagcaggggaacgtcttctcatgctccgtgatgcatgaggctctgcacaaccactacacgcaggacagcctctccctgtctcccgggggaggcggtggatcctctccaggtcaaggtactcaatccgaaaactcctgcacccacttcccgggtaacctgccgaacatgctgcgtgacctgcgtgacgctttctcccgtgttgacaccttcttccagatgaaagaccagctggacaacctgctgctgaaagaatccctgctggaagacttcaaaggttacctgggttgtcaggctctgtccgaaatgatccagttctacctggaagaagttatgccgcaggctgaaaaccaggacccggacatcaaagctcacgttaactccctgggtgaaaacctgaaaaccctgcgtctgcgtctgcgccgttgccatcgattcctgccgtgcgaaaacggtggcggttctggtggtaaatccaaagctgttgaacaggttaaaaacgctttcaacaaactgcaggaaaaaggtatctacaaagctatgtccgaattcgacatcttcatcaactacatcgaagcttacatgaccatgaaaatccgtaactag

SEQ ID NO: 548 - DNA, 1926 bp, synthetic construct
  misc_feature 1..1926: note = Synthetic
  source 1..1926: mol_type = other DNA
atggacatgagggtgcccgctcagctcctggggctcctgctgctgtggctgagaggtgcgcgctgtgaggtgcaggtgttggagtctgggggaggcttggtacagcctggggagtccctgagactctcctgtacagcctctggattcacctttaacgcctatgccatgagctgggtccgccaggctccagggaaggggctggagtgggtgtcaactattagtggtagtggtagtaccacatactacgcagactccgtgaagggccggttcaccatctccagagacaattccaagaacacgctggatctgcaaatgaacagcctgagagccgcggacacggccgtatattactgtgcgaaagttgctggaagtaactttttctttgaccactggggccagggaaccctggttaccgtgtcctcagcctccaccaagggcccatcggtcttccccctggcaccctcctccaagagcacctctgggggcacagcggccctgggctgcctggtcaaggactacttccccgaaccggtgacggtgtcgtggaactcaggcgccctgaccagcggcgtgcacaccttcccggctgtcctacagtcctcaggactctactccctcagcagcgtggtgaccgtgccctccagcagcttgggcacccagacctacatctgcaacgtgaatcacaagcccagcaacaccaaggtggacaagaaagttgagcccaaatcttgtgacaaaactcacacatgcccaccgtgcccagcacctgaactcctggggggaccgtcagtcttcctcttccccccaaaacccaaggacaccctcatgatctcccggacccctgaggtcacatgcgtggtggtggacgtgagccacgaagaccctgaggtcaagttcaactggtacgtggacggcgtggaggtgcataatgccaagacaaagccgtgcgaggagcagtacggcagcacgtaccgttgcgtcagcgtcctcaccgtcctgcaccaggactggctgaatggcaaggagtacaagtgcaaggtgtccaacaaagccctcccagcccccatcgagaaaaccatctccaaagccaaagggcagccccgagaaccacaggtgtacaccctgcccccatcccggaaggagatgaccaagaaccaggtcagcctgacctgcctggtcaaaggcttctatcccagcgacatcgccgtggagtgggagagcaatgggcagccggagaacaactacaagaccacgcctcccgtgctgaagtccgacggctccttcttcctctatagcaagctcaccgtggacaagagcaggtggcagcaggggaacgtcttctcatgctccgtgatgcatgaggctctgcacaaccactacacgcagaagagcctctccctgtctcccgggggaggcggtggatcctctccaggtcaaggtactcaatccgaaaactcctgcacccacttcccgggtaacctgccgaacatgctgcgtgacctgcgtgacgctttctcccgtgttaaaaccttcttcgagatgaaagaccagctggacaacctgctgctgaaagaatccctgctggaagacttcaaaggttacctgggttgtcaggctctgtccgaaatgatccagttctacctggaagaagttatgccgcaggctgaaaaccaggacccggacatcaaagctcacgttaactccctgggtgaaaacctgaaaaccctgcgtctgcgtctgcgccgttgccatcgattcctgccgtgcgaaaacggtggcggttctggtggtaaatccaaagctgttgaacaggttaaaaacgctttcaacaaactgcaggaaaaaggtatctacaaagctatgtccgaattcgacatcttcatcaactacatcgaagcttacatgaccatgaaaatccgtaactag

SEQ ID NO: 549 - DNA, 714 bp, synthetic construct; identical to SEQ ID NO: 304
  misc_feature 1..714: note = Synthetic
  source 1..714: mol_type = other DNA

SEQ ID NO: 550 - DNA, 1260 bp, synthetic construct
  misc_feature 1..1260: note = Synthetic
  source 1..1260: mol_type = other DNA
atggacatgagggtgcccgctcagctcctggggctcctgctgctgtggctgagaggtgcgcgctgtgacaaaactcacacatgcccaccgtgcccagcacctgaactcctggggggaccgtcagtcttcctcttccccccaaaacccaaggacaccctcatgatctcccggacccctgaggtcacatgcgtggtggtggacgtgagccacgaagaccctgaggtcaagttcaactggtacgtggacggcgtggaggtgcataatgccaagacaaagccgtgcgaggagcagtacggcagcacgtaccgttgcgtcagcgtcctcaccgtcctgcaccaggactggctgaatggcaaggagtacaagtgcaaggtgtccaacaaagccctcccagcccccatcgagaaaaccatctccaaagccaaagggcagccccgagaaccacaggtgtacaccctgcccccatcccgggaggagatgaccaagaaccaggtcagcctgacctgcctggtcaaaggcttctatcccagcgacatcgccgtggagtgggagagcaatgggcagccggagaacaactacgacaccacgcctcccgtgctggactccgacggctccttcttcctctatagcgacctcaccgtggacaagagcaggtggcagcaggggaacgtcttctcatgctccgtgatgcatgaggctctgcacaaccactacacgcaggacagcctctccctgtctcccgggggaggcggtggatcctctccaggtcaaggtactcaatccgaaaactcctgcacccacttcccgggtaacctgccgaacatgctgcgtgacctgcgtgacgctttctcccgtgttaaaaccttcttcgagatgaaagaccagctggacaacctgctgctgaaagaatccctgctggaagacttcaaaggttacctgggttgtcaggctctgtccgaaatgatccagttctacctggaagaagttatgccgcaggctgaaaaccaggacccggacatcaaagctcacgttaactccctgggtgaaaacctgaaaaccctgcgtctgcgtctgcgccgttgccatcgattcctgccgtgcgaaaacggtggcggttctggtggtaaatccaaagctgttgaacaggttaaaaacgctttcaacaaactgcaggaaaaaggtatctacaaagctatgtccgaattcgacatcttcatcaactacatcgaagcttacatgaccatgaaaatccgtaactag

SEQ ID NO: 551 - DNA, 1926 bp, synthetic construct
  misc_feature 1..1926: note = Synthetic
  source 1..1926: mol_type = other DNA
atggacatgagggtgcccgctcagctcctggggctcctgctgctgtggctgagaggtgcgcgctgtgaggtgcagctgttggagtctgggggaggcttggtacagcctggggggtccctgagactctcctgtgcagcctctggattcacctttagcacctatgccatgaactgggtccgccaggctccagggaaggggctggagtgggtgtcaactgttagtggtagtggtcgtcccacatactacgcagactccgtgaagggccggttcaccatctccagagacaattccaagaacacgctgtatctgcaaatgaacagcctgagagccgaggacacggccgtttattactgtgcgaaggcctactacagtaactacctttttgactactggggccagggaaccctggtcaccgtgtcctcagcctccaccaagggcccatcggtcttccccctggcaccctcctccaagagcacctctgggggcacagcggccctgggctgcctggtcaaggactacttccccgaaccggtgacggtgtcgtggaactcaggcgccctgaccagcggcgtgcacaccttcccggctgtcctacagtcctcaggactctactccctcagcagcgtggtgaccgtgccctccagcagcttgggcacccagacctacatctgcaacgtgaatcacaagcccagcaacaccaaggtggacaagaaagttgagcccaaatcttgtgacaaaactcacacatgcccaccgtgcccagcacctgaactcctggggggaccgtcagtcttcctcttccccccaaaacccaaggacaccctcatgatctcccggacccctgaggtcacatgcgtggtggtggacgtgagccacgaagaccctgaggtcaagttcaactggtacgtggacggcgtggaggtgcataatgccaagacaaagccgtgcgaggagcagtacggcagcacgtaccgttgcgtcagcgtcctcaccgtcctgcaccaggactggctgaatggcaaggagtacaagtgcaaggtgtccaacaaagccctcccagcccccatcgagaaaaccatctccaaagccaaagggcagccccgagaaccacaggtgtacaccctgcccccatcccggaaggagatgaccaagaaccaggtcagcctgacctgcctggtcaaaggcttctatcccagcgacatcgccgtggagtgggagagcaatgggcagccggagaacaactacaagaccacgcctcccgtgctgaagtccgacggctccttcttcctctatagcaagctcaccgtggacaagagcaggtggcagcaggggaacgtcttctcatgctccgtgatgcatgaggctctgcacaaccactacacgcagaagagcctctccctgtctcccgggggaggcggtggatcctctccaggtcaaggtactcaatccgaaaactcctgcacccacttcccgggtaacctgccgaacatgctgcgtgacctgcttgacgctttctcccgtgttaaaaccttcttccagatgaaagaccagctggacaacctgctgctgaaagaatccctgctggaagacttcaaaggttacctgggttgtcaggctctgtccgaaatgatccagttctacctggaagaagttatgccgcaggctgaaaaccaggacccggacatcaaagctcacgttaactccctgggtgaaaacctgaaaaccctgcgtctgcgtctgcgccgttgccatcgattcctgccgtgcgaaaacggtggcggttctggtggtaaatccaaagctgttgaacaggttaaaaacgctttcaacaaactgcaggaaaaaggtatctacaaagctatgtccgaattcgacatcttcatcaactacatcgaagcttacatgaccatgaaaatccgtaactag

SEQ ID NO: 552 - DNA, 714 bp, synthetic construct; identical to SEQ ID NO: 320
  misc_feature 1..714: note = Synthetic
  source 1..714: mol_type = other DNA

SEQ ID NO: 553 - DNA, 1260 bp, synthetic construct; identical to SEQ ID NO: 529
  misc_feature 1..1260: note = Synthetic
  source 1..1260: mol_type = other DNA

SEQ ID NO: 554 - DNA, 1926 bp, synthetic construct
  misc_feature 1..1926: note = Synthetic
  source 1..1926: mol_type = other DNA
atggacatgagggtgcccgctcagctcctggggctcctgctgctgtggctgagaggtgcgcgctgtgaggtgcagctgttggagtctgggggaggcttggtacagcctggggggtccctgagactctcctgtgcagcctctggattcacctttagcacctatgccatgaactgggtccgccaggctccagggaaggggctggagtgggtgtcaactgttagtggtagtggtcgtcccacatactacgcagactccgtgaagggccggttcaccatctccagagacaattccaagaacacgctgtatctgcaaatgaacagcctgagagccgaggacacggccgtttattactgtgcgaaggcctactacagtaactacctttttgactactggggccagggaaccctggtcaccgtgtcctcagcctccaccaagggcccatcggtcttccccctggcaccctcctccaagagcacctctgggggcacagcggccctgggctgcctggtcaaggactacttccccgaaccggtgacggtgtcgtggaactcaggcgccctgaccagcggcgtgcacaccttcccggctgtcctacagtcctcaggactctactccctcagcagcgtggtgaccgtgccctccagcagcttgggcacccagacctacatctgcaacgtgaatcacaagcccagcaacaccaaggtggacaagaaagttgagcccaaatcttgtgacaaaactcacacatgcccaccgtgcccagcacctgaactcctggggggaccgtcagtcttcctcttccccccaaaacccaaggacaccctcatgatctcccggacccctgaggtcacatgcgtggtggtggacgtgagccacgaagaccctgaggtcaagttcaactggtacgtggacggcgtggaggtgcataatgccaagacaaagccgtgcgaggagcagtacggcagcacgtaccgttgcgtcagcgtcctcaccgtcctgcaccaggactggctgaatggcaaggagtacaagtgcaaggtgtccaacaaagccctcccagcccccatcgagaaaaccatctccaaagccaaagggcagccccgagaaccacaggtgtacaccctgcccccatcccggaaggagatgaccaagaaccaggtcagcctgacctgcctggtcaaaggcttctatcccagcgacatcgccgtggagtgggagagcaatgggcagccggagaacaactacaagaccacgcctcccgtgctgaagtccgacggctccttcttcctctatagcaagctcaccgtggacaagagcaggtggcagcaggggaacgtcttctcatgctccgtgatgcatgaggctctgcacaaccactacacgcagaagagcctctccctgtctcccgggggaggcggtggatcctctccaggtcaaggtactcaatccgaaaactcctgcacccacttcccgggtaacctgccgaacatgctgcgtgacctgcgtgacgctttctcccgtgttaaaaccttcttccagatgaaagaccagctggacaacctgctgctgaaagaatccctgctggaagacttcaaaggttacctgggttgtcaggctctgtccgaaatgatccagttctacctggaagaagttatgccgcaggctgaaaaccaggacccggacatcaaagctcacgttaactccctgggtgaaaacctgaaaaccctgcgtctgcgtctgcgccgttgccatcgattcctgccgtgcgaaaacggtggcggttctggtggtaaatccaaagctgttgaacaggttaaaaacgctttcaacaaactgcaggaaaaaggtatctacttagctatgtccgaattcgacatcttcatcaactacatcgaagcttacatgaccatgaaaatccgtaactag

SEQ ID NO: 555 - DNA, 714 bp, synthetic construct; identical to SEQ ID NO: 320
  misc_feature 1..714: note = Synthetic
  source 1..714: mol_type = other DNA

SEQ ID NO: 556 - DNA, 1260 bp, synthetic construct; identical to SEQ ID NO: 532
  misc_feature 1..1260: note = Synthetic
  source 1..1260: mol_type = other DNA

SEQ ID NO: 557 - DNA, 1926 bp, synthetic construct
  misc_feature 1..1926: note = Synthetic
  source 1..1926: mol_type = other DNA
atggacatgagggtgcccgctcagctcctggggctcctgctgctgtggctgagaggtgcgcgctgtgaggtgcagctgttggagtctgggggaggcttggtacagcctggggggtccctgagactctcctgtgcagcctctggattcacctttagcacctatgccatgaactgggtccgccaggctccagggaaggggctggagtgggtgtcaactgttagtggtagtggtcgtcccacatactacgcagactccgtgaagggccggttcaccatctccagagacaattccaagaacacgctgtatctgcaaatgaacagcctgagagccgaggacacggccgtttattactgtgcgaaggcctactacagtaactacctttttgactactggggccagggaaccctggtcaccgtgtcctcagcctccaccaagggcccatcggtcttccccctggcaccctcctccaagagcacctctgggggcacagcggccctgggctgcctggtcaaggactacttccccgaaccggtgacggtgtcgtggaactcaggcgccctgaccagcggcgtgcacaccttcccggctgtcctacagtcctcaggactctactccctcagcagcgtggtgaccgtgccctccagcagcttgggcacccagacctacatctgcaacgtgaatcacaagcccagcaacaccaaggtggacaagaaagttgagcccaaatcttgtgacaaaactcacacatgcccaccgtgcccagcacctgaactcctggggggaccgtcagtcttcctcttccccccaaaacccaaggacaccctcatgatctcccggacccctgaggtcacatgcgtggtggtggacgtgagccacgaagaccctgaggtcaagttcaactggtacgtggacggcgtggaggtgcataatgccaagacaaagccgtgcgaggagcagtacggcagcacgtaccgttgcgtcagcgtcctcaccgtcctgcaccaggactggctgaatggcaaggagtacaagtgcaaggtgtccaacaaagccctcccagcccccatcgagaaaaccatctccaaagccaaagggcagccccgagaaccacaggtgtacaccctgcccccatcccggaaggagatgaccaagaaccaggtcagcctgacctgcctggtcaaaggcttctatcccagcgacatcgccgtggagtgggagagcaatgggcagccggagaacaactacaagaccacgcctcccgtgctgaagtccgacggctccttcttcctctatagcaagctcaccgtggacaagagcaggtggcagcaggggaacgtcttctcatgctccgtgatgcatgaggctctgcacaaccactacacgcagaagagcctctccctgtctcccgggggaggcggtggatcctctccaggtcaaggtactcaatccgaaaactcctgcacccacttcccgggtaacctgccgaacatgctgcgtgacctgcgtgacgctttctcccgtgttaaaaccttcttccagatgaaagaccagctggacaacctgctgctgaaagaatccctgctggaagacttcaaaggttacctgggttgtcaggctctgtccgaaatgatccagttctacctggaagaagttatgccgcaggctgaaaaccaggacccggacatcaaagctcacgttaactccctgggtgaaaacctgaaaaccctgcgtctgcgtctgcgccgttgccatcgattcctgccgtgcgaaaacggtggcggttctggtggtaaatccaaagctgttgaacaggttaaaaacgctttcaacaaactgcaggaaaaaggtatctacgacgctatgtccgaattcgacatcttcatcaactacatcgaagcttacatgaccatgaaaatccgtaactag

SEQ ID NO: 558 - DNA, 714 bp, synthetic construct; identical to SEQ ID NO: 320
  misc_feature 1..714: note = Synthetic
  source 1..714: mol_type = other DNA

SEQ ID NO: 559 - DNA, 1260 bp, synthetic construct; identical to SEQ ID NO: 535
  misc_feature 1..1260: note = Synthetic
  source 1..1260: mol_type = other DNA

SEQ ID NO: 560 - DNA, 1926 bp, synthetic construct
  misc_feature 1..1926: note = Synthetic
  source 1..1926: mol_type = other DNA
atggacatgagggtgcccgctcagctcctggggctcctgctgctgtggctgagaggtgcgcgctgtgaggtgcagctgttggagtctgggggaggcttggtacagcctggggggtccctgagactctcctgtgcagcctctggattcacctttagcacctatgccatgaactgggtccgccaggctccagggaaggggctggagtgggtgtcaactgttagtggtagtggtcgtcccacatactacgcagactccgtgaagggccggttcaccatctccagagacaattccaagaacacgctgtatctgcaaatgaacagcctgagagccgaggacacggccgtttattactgtgcgaaggcctactacagtaactacctttttgactactggggccagggaaccctggtcaccgtgtcctcagcctccaccaagggcccatcggtcttccccctggcaccctcctccaagagcacctctgggggcacagcggccctgggctgcctggtcaaggactacttccccgaaccggtgacggtgtcgtggaactcaggcgccctgaccagcggcgtgcacaccttcccggctgtcctacagtcctcaggactctactccctcagcagcgtggtgaccgtgccctccagcagcttgggcacccagacctacatctgcaacgtgaatcacaagcccagcaacaccaaggtggacaagaaagttgagcccaaatcttgtgacaaaactcacacatgcccaccgtgcccagcacctgaactcctggggggaccgtcagtcttcctcttccccccaaaacccaaggacaccctcatgatctcccggacccctgaggtcacatgcgtggtggtggacgtgagccacgaagaccctgaggtcaagttcaactggtacgtggacggcgtggaggtgcataatgccaagacaaagccgtgcgaggagcagtacggcagcacgtaccgttgcgtcagcgtcctcaccgtcctgcaccaggactggctgaatggcaaggagtacaagtgcaaggtgtccaacaaagccctcccagcccccatcgagaaaaccatctccaaagccaaagggcagccccgagaaccacaggtgtacaccctgcccccatcccggaaggagatgaccaagaaccaggtcagcctgacctgcctggtcaaaggcttctatcccagcgacatcgccgtggagtgggagagcaatgggcagccggagaacaactacaagaccacgcctcccgtgctgaagtccgacggctccttcttcctctatagcaagctcaccgtggacaagagcaggtggcagcaggggaacgtcttctcatgctccgtgatgcatgaggctctgcacaaccactacacgcagaagagcctctccctgtctcccgggggaggcggtggatcctctccaggtcaaggtactcaatccgaaaactcctgcacccacttcccgggtaacctgccgaacatgctgcgtgacctgcgtgacgctttctcccgtgttaaaaccttcttccagatgaaaggccagctggacaacctgctgctgaaagaatccctgctggaagacttcaaaggttacctgggttgtcaggctctgtccgaaatgatccagttctacctggaagaagttatgccgcaggctgaaaaccaggacccggacatcaaagctcacgttaactccctgggtgaaaacctgaaaaccctgcgtctgcgtctgcgccgttgccatcgattcctgccgtgcgaaaacggtggcggttctggtggtaaatccaaagctgttgaacaggttaaaaacgctttcaacaaactgcaggaaaaaggtatctacaaagctatgtccgaattcgacatcttcatcaactacatcgaagcttacatgaccatgaaaatccgtaactag

SEQ ID NO: 561 - DNA, 714 bp, synthetic construct; identical to SEQ ID NO: 320
  misc_feature 1..714: note = Synthetic
  source 1..714: mol_type = other DNA

SEQ ID NO: 562 - DNA, 1260 bp, synthetic construct; identical to SEQ ID NO: 538
  misc_feature 1..1260: note = Synthetic
  source 1..1260: mol_type = other DNA

SEQ ID NO: 563 - DNA, 1926 bp, synthetic construct
  misc_feature 1..1926: note = Synthetic
  source 1..1926: mol_type = other DNA
atggacatgagggtgcccgctcagctcctggggctcctgctgctgtggctgagaggtgcgcgctgtgaggtgcagctgttggagtctgggggaggcttggtacagcctggggggtccctgagactctcctgtgcagcctctggattcacctttagcacctatgccatgaactgggtccgccaggctccagggaaggggctggagtgggtgtcaactgttagtggtagtggtcgtcccacatactacgcagactccgtgaagggccggttcaccatctccagagacaattccaagaacacgctgtatctgcaaatgaacagcctgagagccgaggacacggccgtttattactgtgcgaaggcctactacagtaactacctttttgactactggggccagggaaccctggtcaccgtgtcctcagcctccaccaagggcccatcggtcttccccctggcaccctcctccaagagcacctctgggggcacagcggccctgggctgcctggtcaaggactacttccccgaaccggtgacggtgtcgtggaactcaggcgccctgaccagcggcgtgcacaccttcccggctgtcctacagtcctcaggactctactccctcagcagcgtggtgaccgtgccctccagcagcttgggcacccagacctacatctgcaacgtgaatcacaagcccagcaacaccaaggtggacaagaaagttgagcccaaatcttgtgacaaaactcacacatgcccaccgtgcccagcacctgaactcctggggggaccgtcagtcttcctcttccccccaaaacccaaggacaccctcatgatctcccggacccctgaggtcacatgcgtggtggtggacgtgagccacgaagaccctgaggtcaagttcaactggtacgtggacggcgtggaggtgcataatgccaagacaaagccgtgcgaggagcagtacggcagcacgtaccgttgcgtcagcgtcctcaccgtcctgcaccaggactggctgaatggcaaggagtacaagtgcaaggtgtccaacaaagccctcccagcccccatcgagaaaaccatctccaaagccaaagggcagccccgagaaccacaggtgtacaccctgcccccatcccggaaggagatgaccaagaaccaggtcagcctgacctgcctggtcaaaggcttctatcccagcgacatcgccgtggagtgggagagcaatgggcagccggagaacaactacaagaccacgcctcccgtgctgaagtccgacggctccttcttcctctatagcaagctcaccgtggacaagagcaggtggcagcaggggaacgtcttctcatgctccgtgatgcatgaggctctgcacaaccactacacgcagaagagcctctccctgtctcccgggggaggcggtggatcctctccaggtcaaggtactcaatccgaaaactcctgcacccacttcccgggtaacctgccgaacatgctgcgtgacctgcgtgacgctttctcccgtgttaaaaccttcttccggatgaaagaccagctggacaacctgctgctgaaagaatccctgctggaagacttcaaaggttacctgggttgtcaggctctgtccgaaatgatccagttctacctggaagaagttatgccgcaggctgaaaaccaggacccggacatcaaagctcacgttaactccctgggtgaaaacctgaaaaccctgcgtctgcgtctgcgccgttgccatcgattcctgccgtgcgaaaacggtggcggttctggtggtaaatccaaagctgttgaacaggttaaaaacgctttcaacaaactgcaggaaaaaggtatctacaaagctatgtccgaattcgacatcttcatcaactacatcgaagcttacatgaccatgaaaatccgtaactag

SEQ ID NO: 564 - DNA, 714 bp, synthetic construct; identical to SEQ ID NO: 320
  misc_feature 1..714: note = Synthetic
  source 1..714: mol_type = other DNA

SEQ ID NO: 565 - DNA, 1260 bp, synthetic construct; identical to SEQ ID NO: 541
  misc_feature 1..1260: note = Synthetic
  source 1..1260: mol_type = other DNA

SEQ ID NO: 566 - DNA, 1926 bp, synthetic construct
  misc_feature 1..1926: note = Synthetic
  source 1..1926: mol_type = other DNA
atggacatgagggtgcccgctcagctcctggggctcctgctgctgtggctgagaggtgcgcgctgtgaggtgcagctgttggagtctgggggaggcttggtacagcctggggggtccctgagactctcctgtgcagcctctggattcacctttagcacctatgccatgaactgggtccgccaggctccagggaaggggctggagtgggtgtcaactgttagtggtagtggtcgtcccacatactacgcagactccgtgaagggccggttcaccatctccagagacaattccaagaacacgctgtatctgcaaatgaacagcctgagagccgaggacacggccgtttattactgtgcgaaggcctactacagtaactacctttttgactactggggccagggaaccctggtcaccgtgtcctcagcctccaccaagggcccatcggtcttccccctggcaccctcctccaagagcacctctgggggcacagcggccctgggctgcctggtcaaggactacttccccgaaccggtgacggtgtcgtggaactcaggcgccctgaccagcggcgtgcacaccttcccggctgtcctacagtcctcaggactctactccctcagcagcgtggtgaccgtgccctccagcagcttgggcacccagacctacatctgcaacgtgaatcacaagcccagcaacaccaaggtggacaagaaagttgagcccaaatcttgtgacaaaactcacacatgcccaccgtgcccagcacctgaactcctggggggaccgtcagtcttcctcttccccccaaaacccaaggacaccctcatgatctcccggacccctgaggtcacatgcgtggtggtggacgtgagccacgaagaccctgaggtcaagttcaactggtacgtggacggcgtggaggtgcataatgccaagacaaagccgtgcgaggagcagtacggcagcacgtaccgttgcgtcagcgtcctcaccgtcctgcaccaggactggctgaatggcaaggagtacaagtgcaaggtgtccaacaaagccctcccagcccccatcgagaaaaccatctccaaagccaaagggcagccccgagaaccacaggtgtacaccctgcccccatcccggaaggagatgaccaagaaccaggtcagcctgacctgcctggtcaaaggcttctatcccagcgacatcgccgtggagtgggagagcaatgggcagccggagaacaactacaagaccacgcctcccgtgctgaagtccgacggctccttcttcctctatagcaagctcaccgtggacaagagcaggtggcagcaggggaacgtcttctcatgctccgtgatgcatgaggctctgcacaaccactacacgcagaagagcctctccctgtctcccgggggaggcggtggatcctctccaggtcaaggtactcaatccgaaaactcctgcacccacttcccgggtaacctgccgaacatgctgcgtgacctgcgtgacgctttctcccgtgttaaaaccttcttccagatgaaagaccagctggacaacaagctgctgaaagaatccctgctggaagacttcaaaggttacctgggttgtcaggctctgtccgaaatgatccagttctacctggaagaagttatgccgcaggctgaaaaccaggacccggacatcaaagctcacgttaactccctgggtgaaaacctgaaaaccctgcgtctgcgtctgcgccgttgccatcgattcctgccgtgcgaaaacggtggcggttctggtggtaaatccaaagctgttgaacaggttaaaaacgctttcaacaaactgcaggaaaaaggtatctacaaagctatgtccgaattcgacatcttcatcaactacatcgaagcttacatgaccatgaaaatccgtaactag

SEQ ID NO: 567 - DNA, 714 bp, synthetic construct; identical to SEQ ID NO: 320
  misc_feature 1..714: note = Synthetic
  source 1..714: mol_type = other DNA

SEQ ID NO: 568 - DNA, 1260 bp, synthetic construct; identical to SEQ ID NO: 544
  misc_feature 1..1260: note = Synthetic
  source 1..1260: mol_type = other DNA

SEQ ID NO: 569 - DNA, 1926 bp, synthetic construct
  misc_feature 1..1926: note = Synthetic
  source 1..1926: mol_type = other DNA
atggacatgagggtgcccgctcagctcctggggctcctgctgctgtggctgagaggtgcgcgctgtgaggtgcagctgttggagtctgggggaggcttggtacagcctggggggtccctgagactctcctgtgcagcctctggattcacctttagcacctatgccatgaactgggtccgccaggctccagggaaggggctggagtgggtgtcaactgttagtggtagtggtcgtcccacatactacgcagactccgtgaagggccggttcaccatctccagagacaattccaagaacacgctgtatctgcaaatgaacagcctgagagccgaggacacggccgtttattactgtgcgaaggcctactacagtaactacctttttgactactggggccagggaaccctggtcaccgtgtcctcagcctccaccaagggcccatcggtcttccccctggcaccctcctccaagagcacctctgggggcacagcggccctgggctgcctggtcaaggactacttccccgaaccggtgacggtgtcgtggaactcaggcgccctgaccagcggcgtgcacaccttcccggctgtcctacagtcctcaggactctactccctcagcagcgtggtgaccgtgccctccagcagcttgggcacccagacctacatctgcaacgtgaatcacaagcccagcaacaccaaggtggacaagaaagttgagcccaaatcttgtgacaaaactcacacatgcccaccgtgcccagcacctgaactcctggggggaccgtcagtcttcctcttccccccaaaacccaaggacaccctcatgatctcccggacccctgaggtcacatgcgtggtggtggacgtgagccacgaagaccctgaggtcaagttcaactggtacgtggacggcgtggaggtgcataatgccaagacaaagccgtgcgaggagcagtacggcagcacgtaccgttgcgtcagcgtcctcaccgtcctgcaccaggactggctgaatggcaaggagtacaagtgcaaggtgtccaacaaagccctcccagcccccatcgagaaaaccatctccaaagccaaagggcagccccgagaaccacaggtgtacaccctgcccccatcccggaaggagatgaccaagaaccaggtcagcctgacctgcctggtcaaaggcttctatcccagcgacatcgccgtggagtgggagagcaatgggcagccggagaacaactacaagaccacgcctcccgtgctgaagtccgacggctccttcttcctctatagcaagctcaccgtggacaagagcaggtggcagcaggggaacgtcttctcatgctccgtgatgcatgaggctctgcacaaccactacacgcagaagagcctctccctgtctcccgggggaggcggtggatcctctccaggtcaaggtactcaatccgaaaactcctgcacccacttcccgggtaacctgccgaacatgctgcgtgacctgcgtgacgctttctcccgtgttgacaccttcttccagatgaaagaccagctggacaacctgctgctgaaagaatccctgctggaagacttcaaaggttacctgggttgtcaggctctgtccgaaatgatccagttctacctggaagaagttatgccgcaggctgaaaaccaggacccggacatcaaagctcacgttaactccctgggtgaaaacctgaaaaccctgcgtctgcgtctgcgccgttgccatcgattcctgccgtgcgaaaacggtggcggttctggtggtaaatccaaagctgttgaacaggttaaaaacgctttcaacaaactgcaggaaaaaggtatctacaaagctatgtccgaattcgacatcttcatcaactacatcgaagcttacatgaccatgaaaatccgtaactag

SEQ ID NO: 570 - DNA, 714 bp, synthetic construct; identical to SEQ ID NO: 320
  misc_feature 1..714: note = Synthetic
  source 1..714: mol_type = other DNA

SEQ ID NO: 571 - DNA, 1260 bp, synthetic construct; identical to SEQ ID NO: 547
  misc_feature 1..1260: note = Synthetic
  source 1..1260: mol_type = other DNA

SEQ ID NO: 572 - DNA, 1926 bp, synthetic construct
  misc_feature 1..1926: note = Synthetic
  source 1..1926: mol_type = other DNA
atggacatgagggtgcccgctcagctcctggggctcctgctgctgtggctgagaggtgcgcgctgtgaggtgcagctgttggagtctgggggaggcttggtacagcctggggggtccctgagactctcctgtgcagcctctggattcacctttagcacctatgccatgaactgggtccgccaggctccagggaaggggctggagtgggtgtcaactgttagtggtagtggtcgtcccacatactacgcagactccgtgaagggccggttcaccatctccagagacaattccaagaacacgctgtatctgcaaatgaacagcctgagagccgaggacacggccgtttattactgtgcgaaggcctactacagtaactacctttttgactactggggccagggaaccctggtcaccgtgtcctcagcctccaccaagggcccatcggtcttccccctggcaccctcctccaagagcacctctgggggcacagcggccctgggctgcctggtcaaggactacttccccgaaccggtgacggtgtcgtggaactcaggcgccctgaccagcggcgtgcacaccttcccggctgtcctacagtcctcaggactctactccctcagcagcgtggtgaccgtgccctccagcagcttgggcacccagacctacatctgcaacgtgaatcacaagcccagcaacaccaaggtggacaagaaagttgagcccaaatcttgtgacaaaactcacacatgcccaccgtgcccagcacctgaactcctggggggaccgtcagtcttcctcttccccccaaaacccaaggacaccctcatgatctcccggacccctgaggtcacatgcgtggtggtggacgtgagccacgaagaccctgaggtcaagttcaactggtacgtggacggcgtggaggtgcataatgccaagacaaagccgtgcgaggagcagtacggcagcacgtaccgttgcgtcagcgtcctcaccgtcctgcaccaggactggctgaatggcaaggagtacaagtgcaaggtgtccaacaaagccctcccagcccccatcgagaaaaccatctccaaagccaaagggcagccccgagaaccacaggtgtacaccctgcccccatcccggaaggagatgaccaagaaccaggtcagcctgacctgcctggtcaaaggcttctatcccagcgacatcgccgtggagtgggagagcaatgggcagccggagaacaactacaagaccacgcctcccgtgctgaagtccgacggctccttcttcctctatagcaagctcaccgtggacaagagcaggtggcagcaggggaacgtcttctcatgctccgtgatgcatgaggctctgcacaaccactacacgcagaagagcctctccctgtctcccgggggaggcggtggatcctctccaggtcaaggtactcaatccgaaaactcctgcacccacttcccgggtaacctgccgaacatgctgcgtgacctgcgtgacgctttctcccgtgttaaaaccttcttcgagatgaaagaccagctggacaacctgctgctgaaagaatccctgctggaagacttcaaaggttacctgggttgtcaggctctgtccgaaatgatccagttctacctggaagaagttatgccgcaggctgaaaaccaggacccggacatcaaagctcacgttaactccctgggtgaaaacctgaaaaccctgcgtctgcgtctgcgccgttgccatcgattcctgccgtgcgaaaacggtggcggttctggtggtaaatccaaagctgttgaacaggttaaaaacgctttcaacaaactgcaggaaaaaggtatctacaaagctatgtccgaattcgacatcttcatcaactacatcgaagcttacatgaccatgaaaatccgtaactag

SEQ ID NO: 573 - DNA, 714 bp, synthetic construct; identical to SEQ ID NO: 320
  misc_feature 1..714: note = Synthetic
  source 1..714: mol_type = other DNA

SEQ ID NO: 574 - DNA, 1260 bp, synthetic construct; identical to SEQ ID NO: 550
  misc_feature 1..1260: note = Synthetic
  source 1..1260: mol_type = other DNA

SEQ ID NO: 575 - DNA, 1926 bp, synthetic construct
  misc_feature 1..1926: note = Synthetic
  source 1..1926: mol_type = other DNA
atggacatgagggtgcccgctcagctcctggggctcctgctgctgtggctgagaggtgcgcgctgtgaggtgcagctgttggagtctgggggaggcatggtacagccgggggggtccctgagactctcctgtgcagtctctggattcacctttagtcgctatgccatgagctgggtccgccaggctccagggaaggggctggagtgggtgtcagaaatgaggggtagtagtggtagcacatactacgcagactccgtgaagggccggttcaccatctccagagacaattccaagaacacgctgtatctgcaaatgaacagcctgagagtcgaggacacggccatctattactgtgcgaaagaatttagcagcaactccctctttgactactggggccagggaaccctggtcaccgtgtcctcagcctccaccaagggcccatcggtcttccccctggcaccctcctccaagagcacctctgggggcacagcggccctgggctgcctggtcaaggactacttccccgaaccggtgacggtgtcgtggaactcaggcgccctgaccagcggcgtgcacaccttcccggctgtcctacagtcctcaggactctactccctcagcagcgtggtgaccgtgccctccagcagcttgggcacccagacctacatctgcaacgtgaatcacaagcccagcaacaccaaggtggacaagaaagttgagcccaaatcttgtgacaaaactcacacatgcccaccgtgcccagcacctgaactcctggggggaccgtcagtcttcctcttccccccaaaacccaaggacaccctcatgatctcccggacccctgaggtcacatgcgtggtggtggacgtgagccacgaagaccctgaggtcaagttcaactggtacgtggacggcgtggaggtgcataatgccaagacaaagccgtgcgaggagcagtacggcagcacgtaccgttgcgtcagcgtcctcaccgtcctgcaccaggactggctgaatggcaaggagtacaagtgcaaggtgtccaacaaagccctcccagcccccatcgagaaaaccatctccaaagccaaagggcagccccgagaaccacaggtgtacaccctgcccccatcccggaaggagatgaccaagaaccaggtcagcctgacctgcctggtcaaaggcttctatcccagcgacatcgccgtggagtgggagagcaatgggcagccggagaacaactacaagaccacgcctcccgtgctgaagtccgacggctccttcttcctctatagcaagctcaccgtggacaagagcaggtggcagcaggggaacgtcttctcatgctccgtgatgcatgaggctctgcacaaccactacacgcagaagagcctctccctgtctcccgggggaggcggtggatcctctccaggtcaaggtactcaatccgaaaactcctgcacccacttcccgggtaacctgccgaacatgctgcgtgacctgcttgacgctttctcccgtgttaaaaccttcttccagatgaaagaccagctggacaacctgctgctgaaagaatccctgctggaagacttcaaaggttacctgggttgtcaggctctgtccgaaatgatccagttctacctggaagaagttatgccgcaggctgaaaaccaggacccggacatcaaagctcacgttaactccctgggtgaaaacctgaaaaccctgcgtctgcgtctgcgccgttgccatcgattcctgccgtgcgaaaacggtggcggttctggtggtaaatccaaagctgttgaacaggttaaaaacgctttcaacaaactgcaggaaaaaggtatctacaaagctatgtccgaattcgacatcttcatcaactacatcgaagcttacatgaccatgaaaatccgtaactag

SEQ ID NO: 576 - DNA, 714 bp, synthetic construct; identical to SEQ ID NO: 336
  misc_feature 1..714: note = Synthetic
  source 1..714: mol_type = other DNA

SEQ ID NO: 577 - DNA, 1260 bp, synthetic construct; identical to SEQ ID NO: 529
  misc_feature 1..1260: note = Synthetic
  source 1..1260: mol_type = other DNA

SEQ ID NO: 578 - DNA, 1926 bp, synthetic construct
  misc_feature 1..1926: note = Synthetic
  source 1..1926: mol_type = other DNA
atggacatgagggtgcccgctcagctcctggggctcctgctgctgtggctgagaggtgcgcgctgtgaggtgcagctgttggagtctgggggaggcatggtacagccgggggggtccctgagactctcctgtgcagtctctggattcacctttagtcgctatgccatgagctgggtccgccaggctccagggaaggggctggagtgggtgtcagaaatgaggggtagtagtggtagcacatactacgcagactccgtgaagggccggttcaccatctccagagacaattccaagaacacgctgtatctgcaaatgaacagcctgagagtcgaggacacggccatctattactgtgcgaaagaatttagcagcaactccctctttgactactggggccagggaaccctggtcaccgtgtcctcagcctccaccaagggcccatcggtcttccccctggcaccctcctccaagagcacctctgggggcacagcggccctgggctgcctggtcaaggactacttccccgaaccggtgacggtgtcgtggaactcaggcgccctgaccagcggcgtgcacaccttcccggctgtcctacagtcctcaggactctactccctcagcagcgtggtgaccgtgccctccagcagcttgggcacccagacctacatctgcaacgtgaatcacaagcccagcaacaccaaggtggacaagaaagttgagcccaaatcttgtgacaaaactcacacatgcccaccgtgcccagcacctgaactcctggggggaccgtcagtcttcctcttccccccaaaacccaaggacaccctcatgatctcccggacccctgaggtcacatgcgtggtggtggacgtgagccacgaagaccctgaggtcaagttcaactggtacgtggacggcgtggaggtgcataatgccaagacaaagccgtgcgaggagcagtacggcagcacgtaccgttgcgtcagcgtcctcaccgtcctgcaccaggactggctgaatggcaaggagtacaagtgcaaggtgtccaacaaagccctcccagcccccatcgagaaaaccatctccaaagccaaagggcagccccgagaaccacaggtgtacaccctgcccccatcccggaaggagatgaccaagaaccaggtcagcctgacctgcctggtcaaaggcttctatcccagcgacatcgccgtggagtgggagagcaatgggcagccggagaacaactacaagaccacgcctcccgtgctgaagtccgacggctccttcttcctctatagcaagctcaccgtggacaagagcaggtggcagcaggggaacgtcttctcatgctccgtgatgcatgaggctctgcacaaccactacacgcagaagagcctctccctgtctcccgggggaggcggtggatcctctccaggtcaaggtactcaatccgaaaactcctgcacccacttcccgggtaacctgccgaacatgctgcgtgacctgcgtgacgctttctcccgtgttaaaaccttcttccagatgaaagaccagctggacaacctgctgctgaaagaatccctgctggaagacttcaaaggttacctgggttgtcaggctctgtccgaaatgatccagttctacctggaagaagttatgccgcaggctgaaaaccaggacccggacatcaaagctcacgttaactccctgggtgaaaacctgaaaaccctgcgtctgcgtctgcgccgttgccatcgattcctgccgtgcgaaaacggtggcggttctggtggtaaatccaaagctgttgaacaggttaaaaacgctttcaacaaactgcaggaaaaaggtatctacttagctatgtccgaattcgacatcttcatcaactacatcgaagcttacatgaccatgaaaatccgtaactag

SEQ ID NO: 579 - DNA, 714 bp, synthetic construct; identical to SEQ ID NO: 336
  misc_feature 1..714: note = Synthetic
  source 1..714: mol_type = other DNA

SEQ ID NO: 580 - DNA, 1260 bp, synthetic construct; identical to SEQ ID NO: 532
  misc_feature 1..1260: note = Synthetic
  source 1..1260: mol_type = other DNA

SEQ ID NO: 581 - DNA, 1926 bp, synthetic construct
  misc_feature 1..1926: note = Synthetic
  source 1..1926: mol_type = other DNA
atggacatgagggtgcccgctcagctcctggggctcctgctgctgtggctgagaggtgcgcgctgtgaggtgcagctgttggagtctgggggaggcatggtacagccgggggggtccctgagactctcctgtgcagtctctggattcacctttagtcgctatgccatgagctgggtccgccaggctccagggaaggggctggagtgggtgtcagaaatgaggggtagtagtggtagcacatactacgcagactccgtgaagggccggttcaccatctccagagacaattccaagaacacgctgtatctgcaaatgaacagcctgagagtcgaggacacggccatctattactgtgcgaaagaatttagcagcaactccctctttgactactggggccagggaaccctggtcaccgtgtcctcagcctccaccaagggcccatcggtcttccccctggcaccctcctccaagagcacctctgggggcacagcggccctgggctgcctggtcaaggactacttccccgaaccggtgacggtgtcgtggaactcaggcgccctgaccagcggcgtgcacaccttcccggctgtcctacagtcctcaggactctactccctcagcagcgtggtgaccgtgccctccagcagcttgggcacccagacctacatctgcaacgtgaatcacaagcccagcaacaccaaggtggacaagaaagttgagcccaaatcttgtgacaaaactcacacatgcccaccgtgcccagcacctgaactcctggggggaccgtcagtcttcctcttccccccaaaacccaaggacaccctcatgatctcccggacccctgaggtcacatgcgtggtggtggacgtgagccacgaagaccctgaggtcaagttcaactggtacgtggacggcgtggaggtgcataatgccaagacaaagccgtgcgaggagcagtacggcagcacgtaccgttgcgtcagcgtcctcaccgtcctgcaccaggactggctgaatggcaaggagtacaagtgcaaggtgtccaacaaagccctcccagcccccatcgagaaaaccatctccaaagccaaagggcagccccgagaaccacaggtgtacaccctgcccccatcccggaaggagatgaccaagaaccaggtcagcctgacctgcctggtcaaaggcttctatcccagcgacatcgccgtggagtgggagagcaatgggcagccggagaacaactacaagaccacgcctcccgtgctgaagtccgacggctccttcttcctctatagcaagctcaccgtggacaagagcaggtggcagcaggggaacgtcttctcatgctccgtgatgcatgaggctctgcacaaccactacacgcagaagagcctctccctgtctcccgggggaggcggtggatcctctccaggtcaaggtactcaatccgaaaactcctgcacccacttcccgggtaacctgccgaacatgctgcgtgacctgcgtgacgctttctcccgtgttaaaaccttcttccagatgaaagaccagctggacaacctgctgctgaaagaatccctgctggaagacttcaaaggttacctgggttgtcaggctctgtccgaaatgatccagttctacctggaagaagttatgccgcaggctgaaaaccaggacccggacatcaaagctcacgttaactccctgggtgaaaacctgaaaaccctgcgtctgcgtctgcgccgttgccatcgattcctgccgtgcgaaaacggtggcggttctggtggtaaatccaaagctgttgaacaggttaaaaacgctttcaacaaactgcaggaaaaaggtatctacgacgctatgtccgaattcgacatcttcatcaactacatcgaagcttacatgaccatgaaaatccgtaactag

SEQ ID NO: 582 - DNA, 714 bp, synthetic construct; identical to SEQ ID NO: 336
  misc_feature 1..714: note = Synthetic
  source 1..714: mol_type = other DNA

SEQ ID NO: 583 - DNA, 1260 bp, synthetic construct; identical to SEQ ID NO: 535
  misc_feature 1..1260: note = Synthetic
  source 1..1260: mol_type = other DNA

SEQ ID NO: 584 - DNA, 1926 bp, synthetic construct
  misc_feature 1..1926: note = Synthetic
  source 1..1926: mol_type = other DNA
atggacatgagggtgcccgctcagctcctggggctcctgctgctgtggctgagaggtgcgcgctgtgaggtgcagctgttggagtctgggggaggcatggtacagccgggggggtccctgagactctcctgtgcagtctctggattcacctttagtcgctatgccatgagctgggtccgccaggctccagggaaggggctggagtgggtgtcagaaatgaggggtagtagtggtagcacatactacgcagactccgtgaagggccggttcaccatctccagagacaattccaagaacacgctgtatctgcaaatgaacagcctgagagtcgaggacacggccatctattactgtgcgaaagaatttagcagcaactccctctttgactactggggccagggaaccctggtcaccgtgtcctcagcctccaccaagggcccatcggtcttccccctggcaccctcctccaagagcacctctgggggcacagcggccctgggctgcctggtcaaggactacttccccgaaccggtgacggtgtcgtggaactcaggcgccctgaccagcggcgtgcacaccttcccggctgtcctacagtcctcaggactctactccctcagcagcgtggtgaccgtgccctccagcagcttgggcacccagacctacatctgcaacgtgaatcacaagcccagcaacaccaaggtggacaagaaagttgagcccaaatcttgtgacaaaactcacacatgcccaccgtgcccagcacctgaactcctggggggaccgtcagtcttcctcttccccccaaaacccaaggacaccctcatgatctcccggacccctgaggtcacatgcgtggtggtggacgtgagccacgaagaccctgaggtcaagttcaactggtacgtggacggcgtggaggtgcataatgccaagacaaagccgtgcgaggagcagtacggcagcacgtaccgttgcgtcagcgtcctcaccgtcctgcaccaggactggctgaatggcaaggagtacaagtgcaaggtgtccaacaaagccctcccagcccccatcgagaaaaccatctccaaagccaaagggcagccccgagaaccacaggtgtacaccctgcccccatcccggaaggagatgaccaagaaccaggtcagcctgacctgcctggtcaaaggcttctatcccagcgacatcgccgtggagtgggagagcaatgggcagccggagaacaactacaagaccacgcctcccgtgctgaagtccgacggctccttcttcctctatagcaagctcaccgtggacaagagcaggtggcagcaggggaacgtcttctcatgctccgtgatgcatgaggctctgcacaaccactacacgcagaagagcctctccctgtctcccgggggaggcggtggatcctctccaggtcaaggtactcaatccgaaaactcctgcacccacttcccgggtaacctgccgaacatgctgcgtgacctgcgtgacgctttctcccgtgttaaaaccttcttccagatgaaaggccagctggacaacctgctgctgaaagaatccctgctggaagacttcaaaggttacctgggttgtcaggctctgtccgaaatgatccagttctacctggaagaagttatgccgcaggctgaaaaccaggacccggacatcaaagctcacgttaactccctgggtgaaaacctgaaaaccctgcgtctgcgtctgcgccgttgccatcgattcctgccgtgcgaaaacggtggcggttctggtggtaaatccaaagctgttgaacaggttaaaaacgctttcaacaaactgcaggaaaaaggtatctacaaagctatgtccgaattcgacatcttcatcaactacatcgaagcttacatgaccatgaaaatccgtaactag

SEQ ID NO: 585 - DNA, 714 bp, synthetic construct; identical to SEQ ID NO: 336
  misc_feature 1..714: note = Synthetic
  source 1..714: mol_type = other DNA

SEQ ID NO: 586 - DNA, 1260 bp, synthetic construct; identical to SEQ ID NO: 538
  misc_feature 1..1260: note = Synthetic
  source 1..1260: mol_type = other DNA

SEQ ID NO: 587 - DNA, 1926 bp, synthetic construct
  misc_feature 1..1926: note = Synthetic
  source 1..1926: mol_type = other DNA
atggacatgagggtgcccgctcagctcctggggctcctgctgctgtggctgagaggtgcgcgctgtgaggtgcagctgttggagtctgggggaggcatggtacagccgggggggtccctgagactctcctgtgcagtctctggattcacctttagtcgctatgccatgagctgggtccgccaggctccagggaaggggctggagtgggtgtcagaaatgaggggtagtagtggtagcacatactacgcagactccgtgaagggccggttcaccatctccagagacaattccaagaacacgctgtatctgcaaatgaacagcctgagagtcgaggacacggccatctattactgtgcgaaagaatttagcagcaactccctctttgactactggggccagggaaccctggtcaccgtgtcctcagcctccaccaagggcccatcggtcttccccctggcaccctcctccaagagcacctctgggggcacagcggccctgggctgcctggtcaaggactacttccccgaaccggtgacggtgtcgtggaactcaggcgccctgaccagcggcgtgcacaccttcccggctgtcctacagtcctcaggactctactccctcagcagcgtggtgaccgtgccctccagcagcttgggcacccagacctacatctgcaacgtgaatcacaagcccagcaacaccaaggtggacaagaaagttgagcccaaatcttgtgacaaaactcacacatgcccaccgtgcccagcacctgaactcctggggggaccgtcagtcttcctcttccccccaaaacccaaggacaccctcatgatctcccggacccctgaggtcacatgcgtggtggtggacgtgagccacgaagaccctgaggtcaagttcaactggtacgtggacggcgtggaggtgcataatgccaagacaaagccgtgcgaggagcagtacggcagcacgtaccgttgcgtcagcgtcctcaccgtcctgcaccaggactggctgaatggcaaggagtacaagtgcaaggtgtccaacaaagccctcccagcccccatcgagaaaaccatctccaaagccaaagggcagccccgagaaccacaggtgtacaccctgcccccatcccggaaggagatgaccaagaaccaggtcagcctgacctgcctggtcaaaggcttctatcccagcgacatcgccgtggagtgggagagcaatgggcagccggagaacaactacaagaccacgcctcccgtgctgaagtccgacggctccttcttcctctatagcaagctcaccgtggacaagagcaggtggcagcaggggaacgtcttctcatgctccgtgatgcatgaggctctgcacaaccactacacgcagaagagcctctccctgtctcccgggggaggcggtggatcctctccaggtcaaggtactcaatccgaaaactcctgcacccacttcccgggtaacctgccgaacatgctgcgtgacctgcgtgacgctttctcccgtgttaaaaccttcttccggatgaaagaccagctggacaacctgctgctgaaagaatccctgctggaagacttcaaaggttacctgggttgtcaggctctgtccgaaatgatccagttctacctggaagaagttatgccgcaggctgaaaaccaggacccggacatcaaagctcacgttaactccctgggtgaaaacctgaaaaccctgcgtctgcgtctgcgccgttgccatcgattcctgccgtgcgaaaacggtggcggttctggtggtaaatccaaagctgttgaacaggttaaaaacgctttcaacaaactgcaggaaaaaggtatctacaaagctatgtccgaattcgacatcttcatcaactacatcgaagcttacatgaccatgaaaatccgtaactag

SEQ ID NO: 588 - DNA, 714 bp, synthetic construct; identical to SEQ ID NO: 336
  misc_feature 1..714: note = Synthetic
  source 1..714: mol_type = other DNA

SEQ ID NO: 589 - DNA, 1260 bp, synthetic construct; identical to SEQ ID NO: 541
  misc_feature 1..1260: note = Synthetic
  source 1..1260: mol_type = other DNA

SEQ ID NO: 590 - DNA, 1926 bp, synthetic construct
  misc_feature 1..1926: note = Synthetic
  source 1..1926: mol_type = other DNA
atggacatgagggtgcccgctcagctcctggggctcctgctgctgtggctgagaggtgcgcgctgtgaggtgcagctgttggagtctgggggaggcatggtacagccgggggggtccctgagactctcctgtgcagtctctggattcacctttagtcgctatgccatgagctgggtccgccaggctccagggaaggggctggagtgggtgtcagaaatgaggggtagtagtggtagcacatactacgcagactccgtgaagggccggttcaccatctccagagacaattccaagaacacgctgtatctgcaaatgaacagcctgagagtcgaggacacggccatctattactgtgcgaaagaatttagcagcaactccctctttgactactggggccagggaaccctggtcaccgtgtcctcagcctccaccaagggcccatcggtcttccccctggcaccctcctccaagagcacctctgggggcacagcggccctgggctgcctggtcaaggactacttccccgaaccggtgacggtgtcgtggaactcaggcgccctgaccagcggcgtgcacaccttcccggctgtcctacagtcctcaggactctactccctcagcagcgtggtgaccgtgccctccagcagcttgggcacccagacctacatctgcaacgtgaatcacaagcccagcaacaccaaggtggacaagaaagttgagcccaaatcttgtgacaaaactcacacatgcccaccgtgcccagcacctgaactcctggggggaccgtcagtcttcctcttccccccaaaacccaaggacaccctcatgatctcccggacccctgaggtcacatgcgtggtggtggacgtgagccacgaagaccctgaggtcaagttcaactggtacgtggacggcgtggaggtgcataatgccaagacaaagccgtgcgaggagcagtacggcagcacgtaccgttgcgtcagcgtcctcaccgtcctgcaccaggactggctgaatggcaaggagtacaagtgcaaggtgtccaacaaagccctcccagcccccatcgagaaaaccatctccaaagccaaagggcagccccgagaaccacaggtgtacaccctgcccccatcccggaaggagatgaccaagaaccaggtcagcctgacctgcctggtcaaaggcttctatcccagcgacatcgccgtggagtgggagagcaatgggcagccggagaacaactacaagaccacgcctcccgtgctgaagtccgacggctccttcttcctctatagcaagctcaccgtggacaagagcaggtggcagcaggggaacgtcttctcatgctccgtgatgcatgaggctctgcacaaccactacacgcagaagagcctctccctgtctcccgggggaggcggtggatcctctccaggtcaaggtactcaatccgaaaactcctgcacccacttcccgggtaacctgccgaacatgctgcgtgacctgcgtgacgctttctcccgtgttaaaaccttcttccagatgaaagaccagctggacaacaagctgctgaaagaatccctgctggaagacttcaaaggttacctgggttgtcaggctctgtccgaaatgatccagttctacctggaagaagttatgccgcaggctgaaaaccaggacccggacatcaaagctcacgttaactccctgggtgaaaacctgaaaaccctgcgtctgcgtctgcgccgttgccatcgattcctgccgtgcgaaaacggtggcggttctggtggtaaatccaaagctgttgaacaggttaaaaacgctttcaacaaactgcaggaaaaaggtatctacaaagctatgtccgaattcgacatcttcatcaactacatcgaagcttacatgaccatgaaaatccgtaactag

SEQ ID NO: 591 - DNA, 714 bp, synthetic construct; identical to SEQ ID NO: 336
  misc_feature 1..714: note = Synthetic
  source 1..714: mol_type = other DNA

SEQ ID NO: 592 - DNA, 1260 bp, synthetic construct; identical to SEQ ID NO: 544
  misc_feature 1..1260: note = Synthetic
  source 1..1260: mol_type = other DNA

SEQ ID NO: 593 - DNA, 1926 bp, synthetic construct
  misc_feature 1..1926: note = Synthetic
  source 1..1926: mol_type = other DNA
atggacatgagggtgcccgctcagctcctggggctcctgctgctgtggctgagaggtgcgcgctgtgaggtgcagctgttggagtctgggggaggcatggtacagccgggggggtccctgagactctcctgtgcagtctctggattcacctttagtcgctatgccatgagctgggtccgccaggctccagggaaggggctggagtgggtgtcagaaatgaggggtagtagtggtagcacatactacgcagactccgtgaagggccggttcaccatctccagagacaattccaagaacacgctgtatctgcaaatgaacagcctgagagtcgaggacacggccatctattactgtgcgaaagaatttagcagcaactccctctttgactactggggccagggaaccctggtcaccgtgtcctcagcctccaccaagggcccatcggtcttccccctggcaccctcctccaagagcacctctgggggcacagcggccctgggctgcctggtcaaggactacttccccgaaccggtgacggtgtcgtggaactcaggcgccctgaccagcggcgtgcacaccttcccggctgtcctacagtcctcaggactctactccctcagcagcgtggtgaccgtgccctccagcagcttgggcacccagacctacatctgcaacgtgaatcacaagcccagcaacaccaaggtggacaagaaagttgagcccaaatcttgtgacaaaactcacacatgcccaccgtgcccagcacctgaactcctggggggaccgtcagtcttcctcttccccccaaaacccaaggacaccctcatgatctcccggacccctgaggtcacatgcgtggtggtggacgtgagccacgaagaccctgaggtcaagttcaactggtacgtggacggcgtggaggtgcataatgccaagacaaagccgtgcgaggagcagtacggcagcacgtaccgttgcgtcagcgtcctcaccgtcctgcaccaggactggctgaatggcaaggagtacaagtgcaaggtgtccaacaaagccctcccagcccccatcgagaaaaccatctccaaagccaaagggcagccccgagaaccacaggtgtacaccctgcccccatcccggaaggagatgaccaagaaccaggtcagcctgacctgcctggtcaaaggcttctatcccagcgacatcgccgtggagtgggagagcaatgggcagccggagaacaactacaagaccacgcctcccgtgctgaagtccgacggctccttcttcctctatagcaagctcaccgtggacaagagcaggtggcagcaggggaacgtcttctcatgctccgtgatgcatgaggctctgcacaaccactacacgcagaagagcctctccctgtctcccgggggaggcggtggatcctctccaggtcaaggtactcaatccgaaaactcctgcacccacttcccgggtaacctgccgaacatgctgcgtgacctgcgtgacgctttctcccgtgttgacaccttcttccagatgaaagaccagctggacaacctgctgctgaaagaatccctgctggaagacttcaaaggttacctgggttgtcaggctctgtccgaaatgatccagttctacctggaagaagttatgccgcaggctgaaaaccaggacccggacatcaaagctcacgttaactccctgggtgaaaacctgaaaaccctgcgtctgcgtctgcgccgttgccatcgattcctgccgtgcgaaaacggtggcggttctggtggtaaatccaaagctgttgaacaggttaaaaacgctttcaacaaactgcaggaaaaaggtatctacaaagctatgtccgaattcgacatcttcatcaactacatcgaagcttacatgaccatgaaaatccgtaactag

SEQ ID NO: 594 - DNA, 714 bp, synthetic construct; identical to SEQ ID NO: 336
  misc_feature 1..714: note = Synthetic
  source 1..714: mol_type = other DNA

SEQ ID NO: 595 - DNA, 1260 bp, synthetic construct; identical to SEQ ID NO: 547
  misc_feature 1..1260: note = Synthetic
  source 1..1260: mol_type = other DNA

SEQ ID NO: 596 - DNA, 1926 bp, synthetic construct
  misc_feature 1..1926: note = Synthetic
  source 1..1926: mol_type = other DNA
atggacatgagggtgcccgctcagctcctggggctcctgctgctgtggctgagaggtgcgcgctgtgaggtgcagctgttggagtctgggggaggcatggtacagccgggggggtccctgagactctcctgtgcagtctctggattcacctttagtcgctatgccatgagctgggtccgccaggctccagggaaggggctggagtgggtgtcagaaatgaggggtagtagtggtagcacatactacgcagactccgtgaagggccggttcaccatctccagagacaattccaagaacacgctgtatctgcaaatgaacagcctgagagtcgaggacacggccatctattactgtgcgaaagaatttagcagcaactccctctttgactactggggccagggaaccctggtcaccgtgtcctcagcctccaccaagggcccatcggtcttccccctggcaccctcctccaagagcacctctgggggcacagcggccctgggctgcctggtcaaggactacttccccgaaccggtgacggtgtcgtggaactcaggcgccctgaccagcggcgtgcacaccttcccggctgtcctacagtcctcaggactctactccctcagcagcgtggtgaccgtgccctccagcagcttgggcacccagacctacatctgcaacgtgaatcacaagcccagcaacaccaaggtggacaagaaagttgagcccaaatcttgtgacaaaactcacacatgcccaccgtgcccagcacctgaactcctggggggaccgtcagtcttcctcttccccccaaaacccaaggacaccctcatgatctcccggacccctgaggtcacatgcgtggtggtggacgtgagccacgaagaccctgaggtcaagttcaactggtacgtggacggcgtggaggtgcataatgccaagacaaagccgtgcgaggagcagtacggcagcacgtaccgttgcgtcagcgtcctcaccgtcctgcaccaggactggctgaatggcaaggagtacaagtgcaaggtgtccaacaaagccctcccagcccccatcgagaaaaccatctccaaagccaaagggcagccccgagaaccacaggtgtacaccctgcccccatcccggaaggagatgaccaagaaccaggtcagcctgacctgcctggtcaaaggcttctatcccagcgacatcgccgtggagtgggagagcaatgggcagccggagaacaactacaagaccacgcctcccgtgctgaagtccgacggctccttcttcctctatagcaagctcaccgtggacaagagcaggtggcagcaggggaacgtcttctcatgctccgtgatgcatgaggctctgcacaaccactacacgcagaagagcctctccctgtctcccgggggaggcggtggatcctctccaggtcaaggtactcaatccgaaaactcctgcacccacttcccgggtaacctgccgaacatgctgcgtgacctgcgtgacgctttctcccgtgttaaaaccttcttcgagatgaaagaccagctggacaacctgctgctgaaagaatccctgctggaagacttcaaaggttacctgggttgtcaggctctgtccgaaatgatccagttctacctggaagaagttatgccgcaggctgaaaaccaggacccggacatcaaagctcacgttaactccctgggtgaaaacctgaaaaccctgcgtctgcgtctgcgccgttgccatcgattcctgccgtgcgaaaacggtggcggttctggtggtaaatccaaagctgttgaacaggttaaaaacgctttcaacaaactgcaggaaaaaggtatctacaaagctatgtccgaattcgacatcttcatcaactacatcgaagcttacatgaccatgaaaatccgtaactag

SEQ ID NO: 597 - DNA, 714 bp, synthetic construct; identical to SEQ ID NO: 336
  misc_feature 1..714: note = Synthetic
  source 1..714: mol_type = other DNA

SEQ ID NO: 598 - DNA, 1260 bp, synthetic construct; identical to SEQ ID NO: 550
  misc_feature 1..1260: note = Synthetic
  source 1..1260: mol_type = other DNA

SEQ ID NO: 599 - DNA, 1917 bp, synthetic construct
  misc_feature 1..1917: note = Synthetic
  source 1..1917: mol_type = other DNA
atggacatgagggtgcccgctcagctcctggggctcctgctgctgtggctgagaggtgcgcgctgtgaggtgcagctggtggagtctgggggaggcttggtccagcctggggggtccctgagactctcctgtgcagcctctggattcacctttagcagcaattggatgagctgggtccgccaggctccagggaaggggctggactggatggccagcatgaagcaagatggaagtgagatctactatgtggactctgtgaagggccgattcaccatctccagagacaacgccaagaactcactgcatctgcaaatgaacagcctgagagccgaggacacggctgtgtattactgtgtgagaggagggtggagatttgagtcctggggccagggagccctggtcaccgtgtcctcagcctccaccaagggcccatcggtcttccccctggcaccctcctccaagagcacctctgggggcacagcggccctgggctgcctggtcaaggactacttccccgaaccggtgacggtgtcgtggaactcaggcgccctgaccagcggcgtgcacaccttcccggctgtcctacagtcctcaggactctactccctcagcagcgtggtgaccgtgccctccagcagcttgggcacccagacctacatctgcaacgtgaatcacaagcccagcaacaccaaggtggacaagaaagttgagcccaaatcttgtgacaaaactcacacatgcccaccgtgcccagcacctgaactcctggggggaccgtcagtcttcctcttccccccaaaacccaaggacaccctcatgatctcccggacccctgaggtcacatgcgtggtggtggacgtgagccacgaagaccctgaggtcaagttcaactggtacgtggacggcgtggaggtgcataatgccaagacaaagccgtgcgaggagcagtacggcagcacgtaccgttgcgtcagcgtcctcaccgtcctgcaccaggactggctgaatggcaaggagtacaagtgcaaggtgtccaacaaagccctcccagcccccatcgagaaaaccatctccaaagccaaagggcagccccgagaaccacaggtgtacaccctgcccccatcccggaaggagatgaccaagaaccaggtcagcctgacctgcctggtcaaaggcttctatcccagcgacatcgccgtggagtgggagagcaatgggcagccggagaacaactacaagaccacgcctcccgtgctgaagtccgacggctccttcttcctctatagcaagctcaccgtggacaagagcaggtggcagcaggggaacgtcttctcatgctccgtgatgcatgaggctctgcacaaccactacacgcagaagagcctctccctgtctcccgggggaggcggtggatcctctccaggtcaaggtactcaatccgaaaactcctgcacccacttcccgggtaacctgccgaacatgctgcgtgacctgcttgacgctttctcccgtgttaaaaccttcttccagatgaaagaccagctggacaacctgctgctgaaagaatccctgctggaagacttcaaaggttacctgggttgtcaggctctgtccgaaatgatccagttctacctggaagaagttatgccgcaggctgaaaaccaggacccggacatcaaagctcacgttaactccctgggtgaaaacctgaaaaccctgcgtctgcgtctgcgccgttgccatcgattcctgccgtgcgaaaacggtggcggttctggtggtaaatccaaagctgttgaacaggttaaaaacgctttcaacaaactgcaggaaaaaggtatctacaaagctatgtccgaattcgacatcttcatcaactacatcgaagcttacatgaccatgaaaatccgtaactag

SEQ ID NO: 600 - DNA, 711 bp, synthetic construct; identical to SEQ ID NO: 352
  misc_feature 1..711: note = Synthetic
  source 1..711: mol_type = other DNA

SEQ ID NO: 601 - DNA, 1260 bp, synthetic construct; identical to SEQ ID NO: 529
  misc_feature 1..1260: note = Synthetic
  source 1..1260: mol_type = other DNA

SEQ ID NO: 602 - DNA, 1917 bp, synthetic construct
  misc_feature 1..1917: note = Synthetic
  source 1..1917: mol_type = other DNA
atggacatgagggtgcccgctcagctcctggggctcctgctgctgtggctgagaggtgcgcgctgtgaggtgcagctggtggagtctgggggaggcttggtccagcctggggggtccctgagactctcctgtgcagcctctggattcacctttagcagcaattggatgagctgggtccgccaggctccagggaaggggctggactggatggccagcatgaagcaagatggaagtgagatctactatgtggactctgtgaagggccgattcaccatctccagagacaacgccaagaactcactgcatctgcaaatgaacagcctgagagccgaggacacggctgtgtattactgtgtgagaggagggtggagatttgagtcctggggccagggagccctggtcaccgtgtcctcagcctccaccaagggcccatcggtcttccccctggcaccctcctccaagagcacctctgggggcacagcggccctgggctgcctggtcaaggactacttccccgaaccggtgacggtgtcgtggaactcaggcgccctgaccagcggcgtgcacaccttcccggctgtcctacagtcctcaggactctactccctcagcagcgtggtgaccgtgccctccagcagcttgggcacccagacctacatctgcaacgtgaatcacaagcccagcaacaccaaggtggacaagaaagttgagcccaaatcttgtgacaaaactcacacatgcccaccgtgcccagcacctgaactcctggggggaccgtcagtcttcctcttccccccaaaacccaaggacaccctcatgatctcccggacccctgaggtcacatgcgtggtggtggacgtgagccacgaagaccctgaggtcaagttcaactggtacgtggacggcgtggaggtgcataatgccaagacaaagccgtgcgaggagcagtacggcagcacgtaccgttgcgtcagcgtcctcaccgtcctgcaccaggactggctgaatggcaaggagtacaagtgcaaggtgtccaacaaagccctcccagcccccatcgagaaaaccatctccaaagccaaagggcagccccgagaaccacaggtgtacaccctgcccccatcccggaaggagatgaccaagaaccaggtcagcctgacctgcctggtcaaaggcttctatcccagcgacatcgccgtggagtgggagagcaatgggcagccggagaacaactacaagaccacgcctcccgtgctgaagtccgacggctccttcttcctctatagcaagctcaccgtggacaagagcaggtggcagcaggggaacgtcttctcatgctccgtgatgcatgaggctctgcacaaccactacacgcagaagagcctctccctgtctcccgggggaggcggtggatcctctccaggtcaaggtactcaatccgaaaactcctgcacccacttcccgggtaacctgccgaacatgctgcgtgacctgcgtgacgctttctcccgtgttaaaaccttcttccagatgaaagaccagctggacaacctgctgctgaaagaatccctgctggaagacttcaaaggttacctgggttgtcaggctctgtccgaaatgatccagttctacctggaagaagttatgccgcaggctgaaaaccaggacccggacatcaaagctcacgttaactccctgggtgaaaacctgaaaaccctgcgtctgcgtctgcgccgttgccatcgattcctgccgtgcgaaaacggtggcggttctggtggtaaatccaaagctgttgaacaggttaaaaacgctttcaacaaactgcaggaaaaaggtatctacttagctatgtccgaattcgacatcttcatcaactacatcgaagcttacatgaccatgaaaatccgtaactag

SEQ ID NO: 603 - DNA, 711 bp, synthetic construct; identical to SEQ ID NO: 352
  misc_feature 1..711: note = Synthetic
  source 1..711: mol_type = other DNA

SEQ ID NO: 604 - DNA, 1260 bp, synthetic construct; identical to SEQ ID NO: 532
  misc_feature 1..1260: note = Synthetic
  source 1..1260: mol_type = other DNA

SEQ ID NO: 605 - DNA, 1917 bp, synthetic construct
  misc_feature 1..1917: note = Synthetic
  source 1..1917: mol_type = other DNA
atggacatgagggtgcccgctcagctcctggggctcctgctgctgtggctgagaggtgcgcgctgtgaggtgcagctggtggagtctgggggaggcttggtccagcctggggggtccctgagactctcctgtgcagcctctggattcacctttagcagcaattggatgagctgggtccgccaggctccagggaaggggctggactggatggccagcatgaagcaagatggaagtgagatctactatgtggactctgtgaagggccgattcaccatctccagagacaacgccaagaactcactgcatctgcaaatgaacagcctgagagccgaggacacggctgtgtattactgtgtgagaggagggtggagatttgagtcctggggccagggagccctggtcaccgtgtcctcagcctccaccaagggcccatcggtcttccccctggcaccctcctccaagagcacctctgggggcacagcggccctgggctgcctggtcaaggactacttccccgaaccggtgacggtgtcgtggaactcaggcgccctgaccagcggcgtgcacaccttcccggctgtcctacagtcctcaggactctactccctcagcagcgtggtgaccgtgccctccagcagcttgggcacccagacctacatctgcaacgtgaatcacaagcccagcaacaccaaggtggacaagaaagttgagcccaaatcttgtgacaaaactcacacatgcccaccgtgcccagcacctgaactcctggggggaccgtcagtcttcctcttccccccaaaacccaaggacaccctcatgatctcccggacccctgaggtcacatgcgtggtggtggacgtgagccacgaagaccctgaggtcaagttcaactggtacgtggacggcgtggaggtgcataatgccaagacaaagccgtgcgaggagcagtacggcagcacgtaccgttgcgtcagcgtcctcaccgtcctgcaccaggactggctgaatggcaaggagtacaagtgcaaggtgtccaacaaagccctcccagcccccatcgagaaaaccatctccaaagccaaagggcagccccgagaaccacaggtgtacaccctgcccccatcccggaaggagatgaccaagaaccaggtcagcctgacctgcctggtcaaaggcttctatcccagcgacatcgccgtggagtgggagagcaatgggcagccggagaacaactacaagaccacgcctcccgtgctgaagtccgacggctccttcttcctctatagcaagctcaccgtggacaagagcaggtggcagcaggggaacgtcttctcatgctccgtgatgcatgaggctctgcacaaccactacacgcagaagagcctctccctgtctcccgggggaggcggtggatcctctccaggtcaaggtactcaatccgaaaactcctgcacccacttcccgggtaacctgccgaacatgctgcgtgacctgcgtgacgctttctcccgtgttaaaaccttcttccagatgaaagaccagctggacaacctgctgctgaaagaatccctgctggaagacttcaaaggttacctgggttgtcaggctctgtccgaaatgatccagttctacctggaagaagttatgccgcaggctgaaaaccaggacccggacatcaaagctcacgttaactccctgggtgaaaacctgaaaaccctgcgtctgcgtctgcgccgttgccatcgattcctgccgtgcgaaaacggtggcggttctggtggtaaatccaaagctgttgaacaggttaaaaacgctttcaacaaactgcaggaaaaaggtatctacgacgctatgtccgaattcgacatcttcatcaactacatcgaagcttacatgaccatgaaaatccgtaactag

SEQ ID NO: 606 - DNA, 711 bp, synthetic construct; identical to SEQ ID NO: 352
  misc_feature 1..711: note = Synthetic
  source 1..711: mol_type = other DNA

SEQ ID NO: 607 - DNA, 1260 bp, synthetic construct; identical to SEQ ID NO: 535
  misc_feature 1..1260: note = Synthetic
  source 1..1260: mol_type = other DNA

SEQ ID NO: 608 - DNA, 1917 bp, synthetic construct
  misc_feature 1..1917: note = Synthetic
  source 1..1917: mol_type = other DNA
atggacatgagggtgcccgctcagctcctggggctcctgctgctgtggctgagaggtgcgcgctgtgaggtgcagctggtggagtctgggggaggcttggtccagcctggggggtccctgagactctcctgtgcagcctctggattcacctttagcagcaattggatgagctgggtccgccaggctccagggaaggggctggactggatggccagcatgaagcaagatggaagtgagatctactatgtggactctgtgaagggccgattcaccatctccagagacaacgccaagaactcactgcatctgcaaatgaacagcctgagagccgaggacacggctgtgtattactgtgtgagaggagggtggagatttgagtcctggggccagggagccctggtcaccgtgtcctcagcctccaccaagggcccatcggtcttccccctggcaccctcctccaagagcacctctgggggcacagcggccctgggctgcctggtcaaggactacttccccgaaccggtgacggtgtcgtggaactcaggcgccctgaccagcggcgtgcacaccttcccggctgtcctacagtcctcaggactctactccctcagcagcgtggtgaccgtgccctccagcagcttgggcacccagacctacatctgcaacgtgaatcacaagcccagcaacaccaaggtggacaagaaagttgagcccaaatcttgtgacaaaactcacacatgcccaccgtgcccagcacctgaactcctggggggaccgtcagtcttcctcttccccccaaaacccaaggacaccctcatgatctcccggacccctgaggtcacatgcgtggtggtggacgtgagccacgaagaccctgaggtcaagttcaactggtacgtggacggcgtggaggtgcataatgccaagacaaagccgtgcgaggagcagtacggcagcacgtaccgttgcgtcagcgtcctcaccgtcctgcaccaggactggctgaatggcaaggagtacaagtgcaaggtgtccaacaaagccctcccagcccccatcgagaaaaccatctccaaagccaaagggcagccccgagaaccacaggtgtacaccctgcccccatcccggaaggagatgaccaagaaccaggtcagcctgacctgcctggtcaaaggcttctatcccagcgacatcgccgtggagtgggagagcaatgggcagccggagaacaactacaagaccacgcctcccgtgctgaagtccgacggctccttcttcctctatagcaagctcaccgtggacaagagcaggtggcagcaggggaacgtcttctcatgctccgtgatgcatgaggctctgcacaaccactacacgcagaagagcctctccctgtctcccgggggaggcggtggatcctctccaggtcaaggtactcaatccgaaaactcctgcacccacttcccgggtaacctgccgaacatgctgcgtgacctgcgtgacgctttctcccgtgttaaaaccttcttccagatgaaaggccagctggacaacctgctgctgaaagaatccctgctggaagacttcaaaggttacctgggttgtcaggctctgtccgaaatgatccagttctacctggaagaagttatgccgcaggctgaaaaccaggacccggacatcaaagctcacgttaactccctgggtgaaaacctgaaaaccctgcgtctgcgtctgcgccgttgccatcgattcctgccgtgcgaaaacggtggcggttctggtggtaaatccaaagctgttgaacaggttaaaaacgctttcaacaaactgcaggaaaaaggtatctacaaagctatgtccgaattcgacatcttcatcaactacatcgaagcttacatgaccatgaaaatccgtaactag

SEQ ID NO: 609 - DNA, 711 bp, synthetic construct; identical to SEQ ID NO: 352
  misc_feature 1..711: note = Synthetic
  source 1..711: mol_type = other DNA

SEQ ID NO: 610 - DNA, 1260 bp, synthetic construct; identical to SEQ ID NO: 538
  misc_feature 1..1260: note = Synthetic
  source 1..1260: mol_type = other DNA

SEQ ID NO: 611 - DNA, 1917 bp, synthetic construct
  misc_feature 1..1917: note = Synthetic
  source 1..1917: mol_type = other DNA
atggacatgagggtgcccgctcagctcctggggctcctgctgctgtggctgagaggtgcgcgctgtgaggtgcagctggtggagtctgggggaggcttggtccagcctggggggtccctgagactctcctgtgcagcctctggattcacctttagcagcaattggatgagctgggtccgccaggctccagggaaggggctggactggatggccagcatgaagcaagatggaagtgagatctactatgtggactctgtgaagggccgattcaccatctccagagacaacgccaagaactcactgcatctgcaaatgaacagcctgagagccgaggacacggctgtgtattactgtgtgagaggagggtggagatttgagtcctggggccagggagccctggtcaccgtgtcctcagcctccaccaagggcccatcggtcttccccctggcaccctcctccaagagcacctctgggggcacagcggccctgggctgcctggtcaaggactacttccccgaaccggtgacggtgtcgtggaactcaggcgccctgaccagcggcgtgcacaccttcccggctgtcctacagtcctcaggactctactccctcagcagcgtggtgaccgtgccctccagcagcttgggcacccagacctacatctgcaacgtgaatcacaagcccagcaacaccaaggtggacaagaaagttgagcccaaatcttgtgacaaaactcacacatgcccaccgtgcccagcacctgaactcctggggggaccgtcagtcttcctcttccccccaaaacccaaggacaccctcatgatctcccggacccctgaggtcacatgcgtggtggtggacgtgagccacgaagaccctgaggtcaagttcaactggtacgtggacggcgtggaggtgcataatgccaagacaaagccgtgcgaggagcagtacggcagcacgtaccgttgcgtcagcgtcctcaccgtcctgcaccaggactggctgaatggcaaggagtacaagtgcaaggtgtccaacaaagccctcccagcccccatcgagaaaaccatctccaaagccaaagggcagccccgagaaccacaggtgtacaccctgcccccatcccggaaggagatgaccaagaaccaggtcagcctgacctgcctggtcaaaggcttctatcccagcgacatcgccgtggagtgggagagcaatgggcagccggagaacaactacaagaccacgcctcccgtgctgaagtccgacggctccttcttcctctatagcaagctcaccgtggacaagagcaggtggcagcaggggaacgtcttctcatgctccgtgatgcatgaggctctgcacaaccactacacgcagaagagcctctccctgtctcccgggggaggcggtggatcctctccaggtcaaggtactcaatccgaaaactcctgcacccacttcccgggtaacctgccgaacatgctgcgtgacctgcgtgacgctttctcccgtgttaaaaccttcttccggatgaaagaccagctggacaacctgctgctgaaagaatccctgctggaagacttcaaaggttacctgggttgtcaggctctgtccgaaatgatccagttctacctggaagaagttatgccgcaggctgaaaaccaggacccggacatcaaagctcacgttaactccctgggtgaaaacctgaaaaccctgcgtctgcgtctgcgccgttgccatcgattcctgccgtgcgaaaacggtggcggttctggtggtaaatccaaagctgttgaacaggttaaaaacgctttcaacaaactgcaggaaaaaggtatctacaaagctatgtccgaattcgacatcttcatcaactacatcgaagcttacatgaccatgaaaatccgtaactag

SEQ ID NO: 612 - DNA, 711 bp, synthetic construct; identical to SEQ ID NO: 352
  misc_feature 1..711: note = Synthetic
  source 1..711: mol_type = other DNA

SEQ ID NO: 613 - DNA, 1260 bp, synthetic construct; identical to SEQ ID NO: 541
  misc_feature 1..1260: note = Synthetic
  source 1..1260: mol_type = other DNA

SEQ ID NO: 614 - DNA, 1917 bp, synthetic construct
  misc_feature 1..1917: note = Synthetic
  source 1..1917: mol_type = other DNA
atggacatgagggtgcccgctcagctcctggggctcctgctgctgtggctgagaggtgcgcgctgtgaggtgcagctggtggagtctgggggaggcttggtccagcctggggggtccctgagactctcctgtgcagcctctggattcacctttagcagcaattggatgagctgggtccgccaggctccagggaaggggctggactggatggccagcatgaagcaagatggaagtgagatctactatgtggactctgtgaagggccgattcaccatctccagagacaacgccaagaactcactgcatctgcaaatgaacagcctgagagccgaggacacggctgtgtattactgtgtgagaggagggtggagatttgagtcctggggccagggagccctggtcaccgtgtcctcagcctccaccaagggcccatcggtcttccccctggcaccctcctccaagagcacctctgggggcacagcggccctgggctgcctggtcaaggactacttccccgaaccggtgacggtgtcgtggaactcaggcgccctgaccagcggcgtgcacaccttcccggctgtcctacagtcctcaggactctactccctcagcagcgtggtgaccgtgccctccagcagcttgggcacccagacctacatctgcaacgtgaatcacaagcccagcaacaccaaggtggacaagaaagttgagcccaaatcttgtgacaaaactcacacatgcccaccgtgcccagcacctgaactcctggggggaccgtcagtcttcctcttccccccaaaacccaaggacaccctcatgatctcccggacccctgaggtcacatgcgtggtggtggacgtgagccacgaagaccctgaggtcaagttcaactggtacgtggacggcgtggaggtgcataatgccaagacaaagccgtgcgaggagcagtacggcagcacgtaccgttgcgtcagcgtcctcaccgtcctgcaccaggactggctgaatggcaaggagtacaagtgcaaggtgtccaacaaagccctcccagcccccatcgagaaaaccatctccaaagccaaagggcagccccgagaaccacaggtgtacaccctgcccccatcccggaaggagatgaccaagaaccaggtcagcctgacctgcctggtcaaaggcttctatcccagcgacatcgccgtggagtgggagagcaatgggcagccggagaacaactacaagaccacgcctcccgtgctgaagtccgacggctccttcttcctctatagcaagctcaccgtggacaagagcaggtggcagcaggggaacgtcttctcatgctccgtgatgcatgaggctctgcacaaccactacacgcagaagagcctctccctgtctcccgggggaggcggtggatcctctccaggtcaaggtactcaatccgaaaactcctgcacccacttcccgggtaacctgccgaacatgctgcgtgacctgcgtgacgctttctcccgtgttaaaaccttcttccagatgaaagaccagctggacaacaagctgctgaaagaatccctgctggaagacttcaaaggttacctgggttgtcaggctctgtccgaaatgatccagttctacctggaagaagttatgccgcaggctgaaaaccaggacccggacatcaaagctcacgttaactccctgggtgaaaacctgaaaaccctgcgtctgcgtctgcgccgttgccatcgattcctgccgtgcgaaaacggtggcggttctggtggtaaatccaaagctgttgaacaggttaaaaacgctttcaacaaactgcaggaaaaaggtatctacaaagctatgtccgaattcgacatcttcatcaactacatcgaagcttacatgaccatgaaaatccgtaactag

SEQ ID NO: 615 - DNA, 711 bp, synthetic construct; identical to SEQ ID NO: 352
  misc_feature 1..711: note = Synthetic
  source 1..711: mol_type = other DNA

SEQ ID NO: 616 - DNA, 1260 bp, synthetic construct; identical to SEQ ID NO: 544
  misc_feature 1..1260: note = Synthetic
  source 1..1260: mol_type = other DNA

SEQ ID NO: 617 - DNA, 1917 bp, synthetic construct
  misc_feature 1..1917: note = Synthetic
  source 1..1917: mol_type = other DNA
atggacatgagggtgcccgctcagctcctggggctcctgctgctgtggctgagaggtgcgcgctgtgaggtgcagctggtggagtctgggggaggcttggtccagcctggggggtccctgagactctcctgtgcagcctctggattcacctttagcagcaattggatgagctgggtccgccaggctccagggaaggggctggactggatggccagcatgaagcaagatggaagtgagatctactatgtggactctgtgaagggccgattcaccatctccagagacaacgccaagaactcactgcatctgcaaatgaacagcctgagagccgaggacacggctgtgtattactgtgtgagaggagggtggagatttgagtcctggggccagggagccctggtcaccgtgtcctcagcctccaccaagggcccatcggtcttccccctggcaccctcctccaagagcacctctgggggcacagcggccctgggctgcctggtcaaggactacttccccgaaccggtgacggtgtcgtggaactcaggcgccctgaccagcggcgtgcacaccttcccggctgtcctacagtcctcaggactctactccctcagcagcgtggtgaccgtgccctccagcagcttgggcacccagacctacatctgcaacgtgaatcacaagcccagcaacaccaaggtggacaagaaagttgagcccaaatcttgtgacaaaactcacacatgcccaccgtgcccagcacctgaactcctggggggaccgtcagtcttcctcttccccccaaaacccaaggacaccctcatgatctcccggacccctgaggtcacatgcgtggtggtggacgtgagccacgaagaccctgaggtcaagttcaactggtacgtggacggcgtggaggtgcataatgccaagacaaagccgtgcgaggagcagtacggcagcacgtaccgttgcgtcagcgtcctcaccgtcctgcaccaggactggctgaatggcaaggagtacaagtgcaaggtgtccaacaaagccctcccagcccccatcgagaaaaccatctccaaagccaaagggcagccccgagaaccacaggtgtacaccctgcccccatcccggaaggagatgaccaagaaccaggtcagcctgacctgcctggtcaaaggcttctatcccagcgacatcgccgtggagtgggagagcaatgggcagccggagaacaactacaagaccacgcctcccgtgctgaagtccgacggctccttcttcctctatagcaagctcaccgtggacaagagcaggtggcagcaggggaacgtcttctcatgctccgtgatgcatgaggctctgcacaaccactacacgcagaagagcctctccctgtctcccgggggaggcggtggatcctctccaggtcaaggtactcaatccgaaaactcctgcacccacttcccgggtaacctgccgaacatgctgcgtgacctgcgtgacgctttctcccgtgttgacaccttcttccagatgaaagaccagctggacaacctgctgctgaaagaatccctgctggaagacttcaaaggttacctgggttgtcaggctctgtccgaaatgatccagttctacctggaagaagttatgccgcaggctgaaaaccaggacccggacatcaaagctcacgttaactccctgggtgaaaacctgaaaaccctgcgtctgcgtctgcgccgttgccatcgattcctgccgtgcgaaaacggtggcggttctggtggtaaatccaaagctgttgaacaggttaaaaacgctttcaacaaactgcaggaaaaaggtatctacaaagctatgtccgaattcgacatcttcatcaactacatcgaagcttacatgaccatgaaaatccgtaactag

SEQ ID NO: 618 - DNA, 711 bp, synthetic construct; identical to SEQ ID NO: 352
  misc_feature 1..711: note = Synthetic
  source 1..711: mol_type = other DNA

SEQ ID NO: 619 - DNA, 1260 bp, synthetic construct; identical to SEQ ID NO: 547
  misc_feature 1..1260: note = Synthetic
  source 1..1260: mol_type = other DNA

SEQ ID NO: 620 - DNA, 1917 bp, synthetic construct
  misc_feature 1..1917: note = Synthetic
  source 1..1917: mol_type = other DNA
atggacatgagggtgcccgctcagctcctggggctcctgctgctgtggctgagaggtgcgcgctgtgaggtgcagctggtggagtctgggggaggcttggtccagcctggggggtccctgagactctcctgtgcagcctctggattcacctttagcagcaattggatgagctgggtccgccaggctccagggaaggggctggactggatggccagcatgaagcaagatggaagtgagatctactatgtggactctgtgaagggccgattcaccatctccagagacaacgccaagaactcactgcatctgcaaatgaacagcctgagagccgaggacacggctgtgtattactgtgtgagaggagggtggagatttgagtcctggggccagggagccctggtcaccgtgtcctcagcctccaccaagggcccatcggtcttccccctggcaccctcctccaagagcacctctgggggcacagcggccctgggctgcctggtcaaggactacttccccgaaccggtgacggtgtcgtggaactcaggcgccctgaccagcggcgtgcacaccttcccggctgtcctacagtcctcaggactctactccctcagcagcgtggtgaccgtgccctccagcagcttgggcacccagacctacatctgcaacgtgaatcacaagcccagcaacaccaaggtggacaagaaagttgagcccaaatcttgtgacaaaactcacacatgcccaccgtgcccagcacctgaactcctggggggaccgtcagtcttcctcttccccccaaaacccaaggacaccctcatgatctcccggacccctgaggtcacatgcgtggtggtggacgtgagccacgaagaccctgaggtcaagttcaactggtacgtggacggcgtggaggtgcataatgccaagacaaagccgtgcgaggagcagtacggcagcacgtaccgttgcgtcagcgtcctcaccgtcctgcaccaggactggctgaatggcaaggagtacaagtgcaaggtgtccaacaaagccctcccagcccccatcgagaaaaccatctccaaagccaaagggcagccccgagaaccacaggtgtacaccctgcccccatcccggaaggagatgaccaagaaccaggtcagcctgacctgcctggtcaaaggcttctatcccagcgacatcgccgtggagtgggagagcaatgggcagccggagaacaactacaagaccacgcctcccgtgctgaagtccgacggctccttcttcctctatagcaagctcaccgtggacaagagcaggtggcagcaggggaacgtcttctcatgctccgtgatgcatgaggctctgcacaaccactacacgcagaagagcctctccctgtctcccgggggaggcggtggatcctctccaggtcaaggtactcaatccgaaaactcctgcacccacttcccgggtaacctgccgaacatgctgcgtgacctgcgtgacgctttctcccgtgttaaaaccttcttcgagatgaaagaccagctggacaacctgctgctgaaagaatccctgctggaagacttcaaaggttacctgggttgtcaggctctgtccgaaatgatccagttctacctggaagaagttatgccgcaggctgaaaaccaggacccggacatcaaagctcacgttaactccctgggtgaaaacctgaaaaccctgcgtctgcgtctgcgccgttgccatcgattcctgccgtgcgaaaacggtggcggttctggtggtaaatccaaagctgttgaacaggttaaaaacgctttcaacaaactgcaggaaaaaggtatctacaaagctatgtccgaattcgacatcttcatcaactacatcgaagcttacatgaccatgaaaatccgtaactag

SEQ ID NO: 621 - DNA, 711 bp, synthetic construct; identical to SEQ ID NO: 352
  misc_feature 1..711: note = Synthetic
  source 1..711: mol_type = other DNA

SEQ ID NO: 622 - DNA, 1260 bp, synthetic construct; identical to SEQ ID NO: 550
  misc_feature 1..1260: note = Synthetic
  source 1..1260: mol_type = other DNA

SEQ ID NO: 623 - DNA, 1920 bp, synthetic construct
  misc_feature 1..1920: note = Synthetic
  source 1..1920: mol_type = other DNA
atggacatgagggtgcccgctcagctcctggggctcctgctgctgtggctgagaggtgcgcgctgtgaggtgcagctggtggagtctgggggaggcttggtccagccgggggggtccctgagactctcctgtgcagcctctggattcacctttagtagctattggatgagctgggtccgccaggctccagggaaggggctggagtgggtggccaacatcaagcaagatggaagtgaggaatattatgtggactctgtgaagggccgattcaccatctccagagacaacgccaagaactcactgtttctgcaaatgaacagcctgagagccgaggacacggctgtgtattactgtgcgagagactacggtgactcctttgactactggggccagggaaccctggtcaccgtgtcctcagcctccaccaagggcccatcggtcttccccctggcaccctcctccaagagcacctctgggggcacagcggccctgggctgcctggtcaaggactacttccccgaaccggtgacggtgtcgtggaactcaggcgccctgaccagcggcgtgcacaccttcccggctgtcctacagtcctcaggactctactccctcagcagcgtggtgaccgtgccctccagcagcttgggcacccagacctacatctgcaacgtgaatcacaagcccagcaacaccaaggtggacaagaaagttgagcccaaatcttgtgacaaaactcacacatgcccaccgtgcccagcacctgaactcctggggggaccgtcagtcttcctcttccccccaaaacccaaggacaccctcatgatctcccggacccctgaggtcacatgcgtggtggtggacgtgagccacgaagaccctgaggtcaagttcaactggtacgtggacggcgtggaggtgcataatgccaagacaaagccgtgcgaggagcagtacggcagcacgtaccgttgcgtcagcgtcctcaccgtcctgcaccaggactggctgaatggcaaggagtacaagtgcaaggtgtccaacaaagccctcccagcccccatcgagaaaaccatctccaaagccaaagggcagccccgagaaccacaggtgtacaccctgcccccatcccggaaggagatgaccaagaaccaggtcagcctgacctgcctggtcaaaggcttctatcccagcgacatcgccgtggagtgggagagcaatgggcagccggagaacaactacaagaccacgcctcccgtgctgaagtccgacggctccttcttcctctatagcaagctcaccgtggacaagagcaggtggcagcaggggaacgtcttctcatgctccgtgatgcatgaggctctgcacaaccactacacgcagaagagcctctccctgtctcccgggggaggcggtggatcctctccaggtcaaggtactcaatccgaaaactcctgcacccacttcccgggtaacctgccgaacatgctgcgtgacctgcttgacgctttctcccgtgttaaaaccttcttccagatgaaagaccagctggacaacctgctgctgaaagaatccctgctggaagacttcaaaggttacctgggttgtcaggctctgtccgaaatgatccagttctacctggaagaagttatgccgcaggctgaaaaccaggacccggacatcaaagctcacgttaactccctgggtgaaaacctgaaaaccctgcgtctgcgtctgcgccgttgccatcgattcctgccgtgcgaaaacggtggcggttctggtggtaaatccaaagctgttgaacaggttaaaaacgctttcaacaaactgcaggaaaaaggtatctacaaagctatgtccgaattcgacatcttcatcaactacatcgaagcttacatgaccatgaaaatccgtaactag

SEQ ID NO: 624 - DNA, 711 bp, synthetic construct; identical to SEQ ID NO: 368
  misc_feature 1..711: note = Synthetic
  source 1..711: mol_type = other DNA

SEQ ID NO: 625 - DNA, 1260 bp, synthetic construct; identical to SEQ ID NO: 529
  misc_feature 1..1260: note = Synthetic
  source 1..1260: mol_type = other DNA

SEQ ID NO: 626 - DNA, 1920 bp, synthetic construct
  misc_feature 1..1920: note = Synthetic
  source 1..1920: mol_type = other DNA
atggacatgagggtgcccgctcagctcctggggctcctgctgctgtggctgagaggtgcgcgctgtgaggtgcagctggtggagtctgggggaggcttggtccagccgggggggtccctgagactctcctgtgcagcctctggattcacctttagtagctattggatgagctgggtccgccaggctccagggaaggggctggagtgggtggccaacatcaagcaagatggaagtgaggaatattatgtggactctgtgaagggccgattcaccatctccagagacaacgccaagaactcactgtttctgcaaatgaacagcctgagagccgaggacacggctgtgtattactgtgcgagagactacggtgactcctttgactactggggccagggaaccctggtcaccgtgtcctcagcctccaccaagggcccatcggtcttccccctggcaccctcctccaagagcacctctgggggcacagcggccctgggctgcctggtcaaggactacttccccgaaccggtgacggtgtcgtggaactcaggcgccctgaccagcggcgtgcacaccttcccggctgtcctacagtcctcaggactctactccctcagcagcgtggtgaccgtgccctccagcagcttgggcacccagacctacatctgcaacgtgaatcacaagcccagcaacaccaaggtggacaagaaagttgagcccaaatcttgtgacaaaactcacacatgcccaccgtgcccagcacctgaactcctggggggaccgtcagtcttcctcttccccccaaaacccaaggacaccctcatgatctcccggacccctgaggtcacatgcgtggtggtggacgtgagccacgaagaccctgaggtcaagttcaactggtacgtggacggcgtggaggtgcataatgccaagacaaagccgtgcgaggagcagtacggcagcacgtaccgttgcgtcagcgtcctcaccgtcctgcaccaggactggctgaatggcaaggagtacaagtgcaaggtgtccaacaaagccctcccagcccccatcgagaaaaccatctccaaagccaaagggcagccccgagaaccacaggtgtacaccctgcccccatcccggaaggagatgaccaagaaccaggtcagcctgacctgcctggtcaaaggcttctatcccagcgacatcgccgtggagtgggagagcaatgggcagccggagaacaactacaagaccacgcctcccgtgctgaagtccgacggctccttcttcctctatagcaagctcaccgtggacaagagcaggtggcagcaggggaacgtcttctcatgctccgtgatgcatgaggctctgcacaaccactacacgcagaagagcctctccctgtctcccgggggaggcggtggatcctctccaggtcaaggtactcaatccgaaaactcctgcacccacttcccgggtaacctgccgaacatgctgcgtgacctgcgtgacgctttctcccgtgttaaaaccttcttccagatgaaagaccagctggacaacctgctgctgaaagaatccctgctggaagacttcaaaggttacctgggttgtcaggctctgtccgaaatgatccagttctacctggaagaagttatgccgcaggctgaaaaccaggacccggacatcaaagctcacgttaactccctgggtgaaaacctgaaaaccctgcgtctgcgtctgcgccgttgccatcgattcctgccgtgcgaaaacggtggcggttctggtggtaaatccaaagctgttgaacaggttaaaaacgctttcaacaaactgcaggaaaaaggtatctacttagctatgtccgaattcgacatcttcatcaactacatcgaagcttacatgaccatgaaaatccgtaactag

SEQ ID NO: 627 - DNA, 711 bp, synthetic construct; identical to SEQ ID NO: 368
  misc_feature 1..711: note = Synthetic
  source 1..711: mol_type = other DNA

SEQ ID NO: 628 - DNA, 1260 bp, synthetic construct; identical to SEQ ID NO: 532
  misc_feature 1..1260: note = Synthetic
  source 1..1260: mol_type = other DNA

SEQ ID NO: 629 - DNA, 1920 bp, synthetic construct
  misc_feature 1..1920: note = Synthetic
  source 1..1920: mol_type = other DNA
atggacatgagggtgcccgctcagctcctggggctcctgctgctgtggctgagaggtgcgcgctgtgaggtgcagctggtggagtctgggggaggcttggtccagccgggggggtccctgagactctcctgtgcagcctctggattcacctttagtagctattggatgagctgggtccgccaggctccagggaaggggctggagtgggtggccaacatcaagcaagatggaagtgaggaatattatgtggactctgtgaagggccgattcaccatctccagagacaacgccaagaactcactgtttctgcaaatgaacagcctgagagccgaggacacggctgtgtattactgtgcgagagactacggtgactcctttgactactggggccagggaaccctggtcaccgtgtcctcagcctccaccaagggcccatcggtcttccccctggcaccctcctccaagagcacctctgggggcacagcggccctgggctgcctggtcaaggactacttccccgaaccggtgacggtgtcgtggaactcaggcgccctgaccagcggcgtgcacaccttcccggctgtcctacagtcctcaggactctactccctcagcagcgtggtgaccgtgccctccagcagcttgggcacccagacctacatctgcaacgtgaatcacaagcccagcaacaccaaggtggacaagaaagttgagcccaaatcttgtgacaaaactcacacatgcccaccgtgcccagcacctgaactcctggggggaccgtcagtcttcctcttccccccaaaacccaaggacaccctcatgatctcccggacccctgaggtcacatgcgtggtggtggacgtgagccacgaagaccctgaggtcaagttcaactggtacgtggacggcgtggaggtgcataatgccaagacaaagccgtgcgaggagcagtacggcagcacgtaccgttgcgtcagcgtcctcaccgtcctgcaccaggactggctgaatggcaaggagtacaagtgcaaggtgtccaacaaagccctcccagcccccatcgagaaaaccatctccaaagccaaagggcagccccgagaaccacaggtgtacaccctgcccccatcccggaaggagatgaccaagaaccaggtcagcctgacctgcctggtcaaaggcttctatcccagcgacatcgccgtggagtgggagagcaatgggcagccggagaacaactacaagaccacgcctcccgtgctgaagtccgacggctccttcttcctctatagcaagctcaccgtggacaagagcaggtggcagcaggggaacgtcttctcatgctccgtgatgcatgaggctctgcacaaccactacacgcagaagagcctctccctgtctcccgggggaggcggtggatcctctccaggtcaaggtactcaatccgaaaactcctgcacccacttcccgggtaacctgccgaacatgctgcgtgacctgcgtgacgctttctcccgtgttaaaaccttcttccagatgaaagaccagctggacaacctgctgctgaaagaatccctgctggaagacttcaaaggttacctgggttgtcaggctctgtccgaaatgatccagttctacctggaagaagttatgccgcaggctgaaaaccaggacccggacatcaaagctcacgttaactccctgggtgaaaacctgaaaaccctgcgtctgcgtctgcgccgttgccatcgattcctgccgtgcgaaaacggtggcggttctggtggtaaatccaaagctgttgaacaggttaaaaacgctttcaacaaactgcaggaaaaaggtatctacgacgctatgtccgaattcgacatcttcatcaactacatcgaagcttacatgaccatgaaaatccgtaactag

SEQ ID NO: 630 - DNA, 711 bp, synthetic construct; identical to SEQ ID NO: 368
  misc_feature 1..711: note = Synthetic
  source 1..711: mol_type = other DNA

SEQ ID NO: 631 - DNA, 1260 bp, synthetic construct; identical to SEQ ID NO: 535
  misc_feature 1..1260: note = Synthetic
  source 1..1260: mol_type = other DNA

SEQ ID NO: 632 - DNA, 1920 bp, synthetic construct
  misc_feature 1..1920: note = Synthetic
  source 1..1920: mol_type = other DNA
atggacatgagggtgcccgctcagctcctggggctcctgctgctgtggctgagaggtgcgcgctgtgaggtgcagctggtggagtctgggggaggcttggtccagccgggggggtccctgagactctcctgtgcagcctctggattcacctttagtagctattggatgagctgggtccgccaggctccagggaaggggctggagtgggtggccaacatcaagcaagatggaagtgaggaatattatgtggactctgtgaagggccgattcaccatctccagagacaacgccaagaactcactgtttctgcaaatgaacagcctgagagccgaggacacggctgtgtattactgtgcgagagactacggtgactcctttgactactggggccagggaaccctggtcaccgtgtcctcagcctccaccaagggcccatcggtcttccccctggcaccctcctccaagagcacctctgggggcacagcggccctgggctgcctggtcaaggactacttccccgaaccggtgacggtgtcgtggaactcaggcgccctgaccagcggcgtgcacaccttcccggctgtcctacagtcctcaggactctactccctcagcagcgtggtgaccgtgccctccagcagcttgggcacccagacctacatctgcaacgtgaatcacaagcccagcaacaccaaggtggacaagaaagttgagcccaaatcttgtgacaaaactcacacatgcccaccgtgcccagcacctgaactcctggggggaccgtcagtcttcctcttccccccaaaacccaaggacaccctcatgatctcccggacccctgaggtcacatgcgtggtggtggacgtgagccacgaagaccctgaggtcaagttcaactggtacgtggacggcgtggaggtgcataatgccaagacaaagccgtgcgaggagcagtacggcagcacgtaccgttgcgtcagcgtcctcaccgtcctgcaccaggactggctgaatggcaaggagtacaagtgcaaggtgtccaacaaagccctcccagcccccatcgagaaaaccatctccaaagccaaagggcagccccgagaaccacaggtgtacaccctgcccccatcccggaaggagatgaccaagaaccaggtcagcctgacctgcctggtcaaaggcttctatcccagcgacatcgccgtggagtgggagagcaatgggcagccggagaacaactacaagaccacgcctcccgtgctgaagtccgacggctccttcttcctctatagcaagctcaccgtggacaagagcaggtggcagcaggggaacgtcttctcatgctccgtgatgcatgaggctctgcacaaccactacacgcagaagagcctctccctgtctcccgggggaggcggtggatcctctccaggtcaaggtactcaatccgaaaactcctgcacccacttcccgggtaacctgccgaacatgctgcgtgacctgcgtgacgctttctcccgtgttaaaaccttcttccagatgaaaggccagctggacaacctgctgctgaaagaatccctgctggaagacttcaaaggttacctgggttgtcaggctctgtccgaaatgatccagttctacctggaagaagttatgccgcaggctgaaaaccaggacccggacatcaaagctcacgttaactccctgggtgaaaacctgaaaaccctgcgtctgcgtctgcgccgttgccatcgattcctgccgtgcgaaaacggtggcggttctggtggtaaatccaaagctgttgaacaggttaaaaacgctttcaacaaactgcaggaaaaaggtatctacaaagctatgtccgaattcgacatcttcatcaactacatcgaagcttacatgaccatgaaaatccgtaactag

SEQ ID NO: 633 - DNA, 711 bp, synthetic construct; identical to SEQ ID NO: 368
  misc_feature 1..711: note = Synthetic
  source 1..711: mol_type = other DNA

SEQ ID NO: 634 - DNA, 1260 bp, synthetic construct; identical to SEQ ID NO: 538
  misc_feature 1..1260: note = Synthetic
  source 1..1260: mol_type = other DNA

SEQ ID NO: 635 - DNA, 1920 bp, synthetic construct
  misc_feature 1..1920: note = Synthetic
  source 1..1920: mol_type = other DNA
atggacatgagggtgcccgctcagctcctggggctcctgctgctgtggctgagaggtgcgcgctgtgaggtgcagctggtggagtctgggggaggcttggtccagccgggggggtccctgagactctcctgtgcagcctctggattcacctttagtagctattggatgagctgggtccgccaggctccagggaaggggctggagtgggtggccaacatcaagcaagatggaagtgaggaatattatgtggactctgtgaagggccgattcaccatctccagagacaacgccaagaactcactgtttctgcaaatgaacagcctgagagccgaggacacggctgtgtattactgtgcgagagactacggtgactcctttgactactggggccagggaaccctggtcaccgtgtcctcagcctccaccaagggcccatcggtcttccccctggcaccctcctccaagagcacctctgggggcacagcggccctgggctgcctggtcaaggactacttccccgaaccggtgacggtgtcgtggaactcaggcgccctgaccagcggcgtgcacaccttcccggctgtcctacagtcctcaggactctactccctcagcagcgtggtgaccgtgccctccagcagcttgggcacccagacctacatctgcaacgtgaatcacaagcccagcaacaccaaggtggacaagaaagttgagcccaaatcttgtgacaaaactcacacatgcccaccgtgcccagcacctgaactcctggggggaccgtcagtcttcctcttccccccaaaacccaaggacaccctcatgatctcccggacccctgaggtcacatgcgtggtggtggacgtgagccacgaagaccctgaggtcaagttcaactggtacgtggacggcgtggaggtgcataatgccaagacaaagccgtgcgaggagcagtacggcagcacgtaccgttgcgtcagcgtcctcaccgtcctgcaccaggactggctgaatggcaaggagtacaagtgcaaggtgtccaacaaagccctcccagcccccatcgagaaaaccatctccaaagccaaagggcagccccgagaaccacaggtgtacaccctgcccccatcccggaaggagatgaccaagaaccaggtcagcctgacctgcctggtcaaaggcttctatcccagcgacatcgccgtggagtgggagagcaatgggcagccggagaacaactacaagaccacgcctcccgtgctgaagtccgacggctccttcttcctctatagcaagctcaccgtggacaagagcaggtggcagcaggggaacgtcttctcatgctccgtgatgcatgaggctctgcacaaccactacacgcagaagagcctctccctgtctcccgggggaggcggtggatcctctccaggtcaaggtactcaatccgaaaactcctgcacccacttcccgggtaacctgccgaacatgctgcgtgacctgcgtgacgctttctcccgtgttaaaaccttcttccggatgaaagaccagctggacaacctgctgctgaaagaatccctgctggaagacttcaaaggttacctgggttgtcaggctctgtccgaaatgatccagttctacctggaagaagttatgccgcaggctgaaaaccaggacccggacatcaaagctcacgttaactccctgggtgaaaacctgaaaaccctgcgtctgcgtctgcgccgttgccatcgattcctgccgtgcgaaaacggtggcggttctggtggtaaatccaaagctgttgaacaggttaaaaacgctttcaacaaactgcaggaaaaaggtatctacaaagctatgtccgaattcgacatcttcatcaactacatcgaagcttacatgaccatgaaaatccgtaactag

SEQ ID NO: 636 - DNA, 711 bp, synthetic construct; identical to SEQ ID NO: 368
  misc_feature 1..711: note = Synthetic
  source 1..711: mol_type = other DNA

SEQ ID NO: 637 - DNA, 1260 bp, synthetic construct; identical to SEQ ID NO: 541
  misc_feature 1..1260: note = Synthetic
  source 1..1260: mol_type = other DNA

SEQ ID NO: 638 - DNA, 1920 bp, synthetic construct
  misc_feature 1..1920: note = Synthetic
  source 1..1920: mol_type = other DNA
atggacatgagggtgcccgctcagctcctggggctcctgctgctgtggctgagaggtgcgcgctgtgaggtgcagctggtggagtctgggggaggcttggtccagccgggggggtccctgagactctcctgtgcagcctctggattcacctttagtagctattggatgagctgggtccgccaggctccagggaaggggctggagtgggtggccaacatcaagcaagatggaagtgaggaatattatgtggactctgtgaagggccgattcaccatctccagagacaacgccaagaactcactgtttctgcaaatgaacagcctgagagccgaggacacggctgtgtattactgtgcgagagactacggtgactcctttgactactggggccagggaaccctggtcaccgtgtcctcagcctccaccaagggcccatcggtcttccccctggcaccctcctccaagagcacctctgggggcacagcggccctgggctgcctggtcaaggactacttccccgaaccggtgacggtgtcgtggaactcaggcgccctgaccagcggcgtgcacaccttcccggctgtcctacagtcctcaggactctactccctcagcagcgtggtgaccgtgccctccagcagcttgggcacccagacctacatctgcaacgtgaatcacaagcccagcaacaccaaggtggacaagaaagttgagcccaaatcttgtgacaaaactcacacatgcccaccgtgcccagcacctgaactcctggggggaccgtcagtcttcctcttccccccaaaacccaaggacaccctcatgatctcccggacccctgaggtcacatgcgtggtggtggacgtgagccacgaagaccctgaggtcaagttcaactggtacgtggacggcgtggaggtgcataatgccaagacaaagccgtgcgaggagcagtacggcagcacgtaccgttgcgtcagcgtcctcaccgtcctgcaccaggactggctgaatggcaaggagtacaagtgcaaggtgtccaacaaagccctcccagcccccatcgagaaaaccatctccaaagccaaagggcagccccgagaaccacaggtgtacaccctgcccccatcccggaaggagatgaccaagaaccaggtcagcctgacctgcctggtcaaaggcttctatcccagcgacatcgccgtggagtgggagagcaatgggcagccggagaacaactacaagaccacgcctcccgtgctgaagtccgacggctccttcttcctctatagcaagctcaccgtggacaagagcaggtggcagcaggggaacgtcttctcatgctccgtgatgcatgaggctctgcacaaccactacacgcagaagagcctctccctgtctcccgggggaggcggtggatcctctccaggtcaaggtactcaatccgaaaactcctgcacccacttcccgggtaacctgccgaacatgctgcgtgacctgcgtgacgctttctcccgtgttaaaaccttcttccagatgaaagaccagctggacaacaagctgctgaaagaatccctgctggaagacttcaaaggttacctgggttgtcaggctctgtccgaaatgatccagttctacctggaagaagttatgccgcaggctgaaaaccaggacccggacatcaaagctcacgttaactccctgggtgaaaacctgaaaaccctgcgtctgcgtctgcgccgttgccatcgattcctgccgtgcgaaaacggtggcggttctggtggtaaatccaaagctgttgaacaggttaaaaacgctttcaacaaactgcaggaaaaaggtatctacaaagctatgtccgaattcgacatcttcatcaactacatcgaagcttacatgaccatgaaaatccgtaactag

SEQ ID NO: 639 - DNA, 711 bp, synthetic construct; identical to SEQ ID NO: 368
  misc_feature 1..711: note = Synthetic
  source 1..711: mol_type = other DNA

SEQ ID NO: 640 - DNA, 1260 bp, synthetic construct; identical to SEQ ID NO: 544
  misc_feature 1..1260: note = Synthetic
  source 1..1260: mol_type = other DNA

SEQ ID NO: 641 - DNA, 1920 bp, synthetic construct
  misc_feature 1..1920: note = Synthetic
  source 1..1920: mol_type = other DNA
atggacatgagggtgcccgctcagctcctggggctcctgctgctgtggctgagaggtgcgcgctgtgaggtgcagctggtggagtctgggggaggcttggtccagccgggggggtccctgagactctcctgtgcagcctctggattcacctttagtagctattggatgagctgggtccgccaggctccagggaaggggctggagtgggtggccaacatcaagcaagatggaagtgaggaatattatgtggactctgtgaagggccgattcaccatctccagagacaacgccaagaactcactgtttctgcaaatgaacagcctgagagccgaggacacggctgtgtattactgtgcgagagactacggtgactcctttgactactggggccagggaaccctggtcaccgtgtcctcagcctccaccaagggcccatcggtcttccccctggcaccctcctccaagagcacctctgggggcacagcggccctgggctgcctggtcaaggactacttccccgaaccggtgacggtgtcgtggaactcaggcgccctgaccagcggcgtgcacaccttcccggctgtcctacagtcctcaggactctactccctcagcagcgtggtgaccgtgccctccagcagcttgggcacccagacctacatctgcaacgtgaatcacaagcccagcaacaccaaggtggacaagaaagttgagcccaaatcttgtgacaaaactcacacatgcccaccgtgcccagcacctgaactcctggggggaccgtcagtcttcctcttccccccaaaacccaaggacaccctcatgatctcccggacccctgaggtcacatgcgtggtggtggacgtgagccacgaagaccctgaggtcaagttcaactggtacgtggacggcgtggaggtgcataatgccaagacaaagccgtgcgaggagcagtacggcagcacgtaccgttgcgtcagcgtcctcaccgtcctgcaccaggactggctgaatggcaaggagtacaagtgcaaggtgtccaacaaagccctcccagcccccatcgagaaaaccatctccaaagccaaagggcagccccgagaaccacaggtgtacaccctgcccccatcccggaaggagatgaccaagaaccaggtcagcctgacctgcctggtcaaaggcttctatcccagcgacatcgccgtggagtgggagagcaatgggcagccggagaacaactacaagaccacgcctcccgtgctgaagtccgacggctccttcttcctctatagcaagctcaccgtggacaagagcaggtggcagcaggggaacgtcttctcatgctccgtgatgcatgaggctctgcacaaccactacacgcagaagagcctctccctgtctcccgggggaggcggtggatcctctccaggtcaaggtactcaatccgaaaactcctgcacccacttcccgggtaacctgccgaacatgctgcgtgacctgcgtgacgctttctcccgtgttgacaccttcttccagatgaaagaccagctggacaacctgctgctgaaagaatccctgctggaagacttcaaaggttacctgggttgtcaggctctgtccgaaatgatccagttctacctggaagaagttatgccgcaggctgaaaaccaggacccggacatcaaagctcacgttaactccctgggtgaaaacctgaaaaccctgcgtctgcgtctgcgccgttgccatcgattcctgccgtgcgaaaacggtggcggttctggtggtaaatccaaagctgttgaacaggttaaaaacgctttcaacaaactgcaggaaaaaggtatctacaaagctatgtccgaattcgacatcttcatcaactacatcgaagcttacatgaccatgaaaatccgtaactag

SEQ ID NO: 642 - DNA, 711 bp, synthetic construct; identical to SEQ ID NO: 368
  misc_feature 1..711: note = Synthetic
  source 1..711: mol_type = other DNA

SEQ ID NO: 643 - DNA, 1260 bp, synthetic construct; identical to SEQ ID NO: 547
  misc_feature 1..1260: note = Synthetic
  source 1..1260: mol_type = other DNA

SEQ ID NO: 644 - DNA, 1920 bp, synthetic construct
  misc_feature 1..1920: note = Synthetic
  source 1..1920: mol_type = other DNA
atggacatgagggtgcccgctcagctcctggggctcctgctgctgtggctgagaggtgcgcgctgtgaggtgcagctggtggagtctgggggaggcttggtccagccgggggggtccctgagactctcctgtgcagcctctggattcacctttagtagctattggatgagctgggtccgccaggctccagggaaggggctggagtgggtggccaacatcaagcaagatggaagtgaggaatattatgtggactctgtgaagggccgattcaccatctccagagacaacgccaagaactcactgtttctgcaaatgaacagcctgagagccgaggacacggctgtgtattactgtgcgagagactacggtgactcctttgactactggggccagggaaccctggtcaccgtgtcctcagcctccaccaagggcccatcggtcttccccctggcaccctcctccaagagcacctctgggggcacagcggccctgggctgcctggtcaaggactacttccccgaaccggtgacggtgtcgtggaactcaggcgccctgaccagcggcgtgcacaccttcccggctgtcctacagtcctcaggactctactccctcagcagcgtggtgaccgtgccctccagcagcttgggcacccagacctacatctgcaacgtgaatcacaagcccagcaacaccaaggtggacaagaaagttgagcccaaatcttgtgacaaaactcacacatgcccaccgtgcccagcacctgaactcctggggggaccgtcagtcttcctcttccccccaaaacccaaggacaccctcatgatctcccggacccctgaggtcacatgcgtggtggtggacgtgagccacgaagaccctgaggtcaagttcaactggtacgtggacggcgtggaggtgcataatgccaagacaaagccgtgcgaggagcagtacggcagcacgtaccgttgcgtcagcgtcctcaccgtcctgcaccaggactggctgaatggcaaggagtacaagtgcaaggtgtccaacaaagccctcccagcccccatcgagaaaaccatctccaaagccaaagggcagccccgagaaccacaggtgtacaccctgcccccatcccggaaggagatgaccaagaaccaggtcagcctgacctgcctggtcaaaggcttctatcccagcgacatcgccgtggagtgggagagcaatgggcagccggagaacaactacaagaccacgcctcccgtgctgaagtccgacggctccttcttcctctatagcaagctcaccgtggacaagagcaggtggcagcaggggaacgtcttctcatgctccgtgatgcatgaggctctgcacaaccactacacgcagaagagcctctccctgtctcccgggggaggcggtggatcctctccaggtcaaggtactcaatccgaaaactcctgcacccacttcccgggtaacctgccgaacatgctgcgtgacctgcgtgacgctttctcccgtgttaaaaccttcttcgagatgaaagaccagctggacaacctgctgctgaaagaatccctgctggaagacttcaaaggttacctgggttgtcaggctctgtccgaaatgatccagttctacctggaagaagttatgccgcaggctgaaaaccaggacccggacatcaaagctcacgttaactccctgggtgaaaacctgaaaaccctgcgtctgcgtctgcgccgttgccatcgattcctgccgtgcgaaaacggtggcggttctggtggtaaatccaaagctgttgaacaggttaaaaacgctttcaacaaactgcaggaaaaaggtatctacaaagctatgtccgaattcgacatcttcatcaactacatcgaagcttacatgaccatgaaaatccgtaactag

SEQ ID NO: 645 - DNA, 711 bp, synthetic construct; identical to SEQ ID NO: 368
  misc_feature 1..711: note = Synthetic
  source 1..711: mol_type = other DNA

SEQ ID NO: 646 - DNA, 1260 bp, synthetic construct; identical to SEQ ID NO: 550
  misc_feature 1..1260: note = Synthetic
  source 1..1260: mol_type = other DNA

SEQ ID NO: 647 - DNA, 1935 bp, synthetic construct
  misc_feature 1..1935: note = Synthetic
  source 1..1935: mol_type = other DNA
atggacatgagggtgcccgctcagctcctggggctcctgctgctgtggctgagaggtgcgcgctgtcaggtgcagctggtgcagtctggggctgaggtgaagaagcctggggcctcagtgaaggtgtcctgcaaggcttctggatacaccttcacccgttatgatatcaactgggtgcgacaggccactggacaagggcttgagtggatgggatggctgaaccctaatagtggtaacacaggccagacacagaagttccggggcagagtcaccatgaccagggacacctccatcaatacagcctacatggagctgagcagcctgagatctgaggacacggccgtgtattactgtgcgagaggggggtataccagtgcctggagatggtacttcgatctctggggccgtggcaccctggtcactgtctcctcagcctccaccaagggcccatcggtcttccccctggcaccctcctccaagagcacctctgggggcacagcggccctgggctgcctggtcaaggactacttccccgaaccggtgacggtgtcgtggaactcaggcgccctgaccagcggcgtgcacaccttcccggctgtcctacagtcctcaggactctactccctcagcagcgtggtgaccgtgccctccagcagcttgggcacccagacctacatctgcaacgtgaatcacaagcccagcaacaccaaggtggacaagaaagttgagcccaaatcttgtgacaaaactcacacatgcccaccgtgcccagcacctgaactcctggggggaccgtcagtcttcctcttccccccaaaacccaaggacaccctcatgatctcccggacccctgaggtcacatgcgtggtggtggacgtgagccacgaagaccctgaggtcaagttcaactggtacgtggacggcgtggaggtgcataatgccaagacaaagccgtgcgaggagcagtacggcagcacgtaccgttgcgtcagcgtcctcaccgtcctgcaccaggactggctgaatggcaaggagtacaagtgcaaggtgtccaacaaagccctcccagcccccatcgagaaaaccatctccaaagccaaagggcagccccgagaaccacaggtgtacaccctgcccccatcccggaaggagatgaccaagaaccaggtcagcctgacctgcctggtcaaaggcttctatcccagcgacatcgccgtggagtgggagagcaatgggcagccggagaacaactacaagaccacgcctcccgtgctgaagtccgacggctccttcttcctctatagcaagctcaccgtggacaagagcaggtggcagcaggggaacgtcttctcatgctccgtgatgcatgaggctctgcacaaccactacacgcagaagagcctctccctgtctcccgggggaggcggtggatcctctccaggtcaaggtactcaatccgaaaactcctgcacccacttcccgggtaacctgccgaacatgctgcgtgacctgcttgacgctttctcccgtgttaaaaccttcttccagatgaaagaccagctggacaacctgctgctgaaagaatccctgctggaagacttcaaaggttacctgggttgtcaggctctgtccgaaatgatccagttctacctggaagaagttatgccgcaggctgaaaaccaggacccggacatcaaagctcacgttaactccctgggtgaaaacctgaaaaccctgcgtctgcgtctgcgccgttgccatcgattcctgccgtgcgaaaacggtggcggttctggtggtaaatccaaagctgttgaacaggttaaaaacgctttcaacaaactgcaggaaaaaggtatctacaaagctatgtccgaattcgacatcttcatcaactacatcgaagcttacatgaccatgaaaatccgtaactag

SEQ ID NO: 648 - DNA, 711 bp, synthetic construct; identical to SEQ ID NO: 384
  misc_feature 1..711: note = Synthetic
  source 1..711: mol_type = other DNA

SEQ ID NO: 649 - DNA, 1260 bp, synthetic construct; identical to SEQ ID NO: 529
  misc_feature 1..1260: note = Synthetic
  source 1..1260: mol_type = other DNA

SEQ ID NO: 650 - DNA, 1935 bp, synthetic construct
  misc_feature 1..1935: note = Synthetic
  source 1..1935: mol_type = other DNA
atggacatgagggtgcccgctcagctcctggggctcctgctgctgtggctgagaggtgcgcgctgtcaggtgcagctggtgcagtctggggctgaggtgaagaagcctggggcctcagtgaaggtgtcctgcaaggcttctggatacaccttcacccgttatgatatcaactgggtgcgacaggccactggacaagggcttgagtggatgggatggctgaaccctaatagtggtaacacaggccagacacagaagttccggggcagagtcaccatgaccagggacacctccatcaatacagcctacatggagctgagcagcctgagatctgaggacacggccgtgtattactgtgcgagaggggggtataccagtgcctggagatggtacttcgatctctggggccgtggcaccctggtcactgtctcctcagcctccaccaagggcccatcggtcttccccctggcaccctcctccaagagcacctctgggggcacagcggccctgggctgcctggtcaaggactacttccccgaaccggtgacggtgtcgtggaactcaggcgccctgaccagcggcgtgcacaccttcccggctgtcctacagtcctcaggactctactccctcagcagcgtggtgaccgtgccctccagcagcttgggcacccagacctacatctgcaacgtgaatcacaagcccagcaacaccaaggtggacaagaaagttgagcccaaatcttgtgacaaaactcacacatgcccaccgtgcccagcacctgaactcctggggggaccgtcagtcttcctcttccccccaaaacccaaggacaccctcatgatctcccggacccctgaggtcacatgcgtggtggtggacgtgagccacgaagaccctgaggtcaagttcaactggtacgtggacggcgtggaggtgcataatgccaagacaaagccgtgcgaggagcagtacggcagcacgtaccgttgcgtcagcgtcctcaccgtcctgcaccaggactggctgaatggcaaggagtacaagtgcaaggtgtccaacaaagccctcccagcccccatcgagaaaaccatctccaaagccaaagggcagccccgagaaccacaggtgtacaccctgcccccatcccggaaggagatgaccaagaaccaggtcagcctgacctgcctggtcaaaggcttctatcccagcgacatcgccgtggagtgggagagcaatgggcagccggagaacaactacaagaccacgcctcccgtgctgaagtccgacggctccttcttcctctatagcaagctcaccgtggacaagagcaggtggcagcaggggaacgtcttctcatgctccgtgatgcatgaggctctgcacaaccactacacgcagaagagcctctccctgtctcccgggggaggcggtggatcctctccaggtcaaggtactcaatccgaaaactcctgcacccacttcccgggtaacctgccgaacatgctgcgtgacctgcgtgacgctttctcccgtgttaaaaccttcttccagatgaaagaccagctggacaacctgctgctgaaagaatccctgctggaagacttcaaaggttacctgggttgtcaggctctgtccgaaatgatccagttctacctggaagaagttatgccgcaggctgaaaaccaggacccggacatcaaagctcacgttaactccctgggtgaaaacctgaaaaccctgcgtctgcgtctgcgccgttgccatcgattcctgccgtgcgaaaacggtggcggttctggtggtaaatccaaagctgttgaacaggttaaaaacgctttcaacaaactgcaggaaaaaggtatctacttagctatgtccgaattcgacatcttcatcaactacatcgaagcttacatgaccatgaaaatccgtaactag

SEQ ID NO: 651 - DNA, 711 bp, synthetic construct; identical to SEQ ID NO: 384
  misc_feature 1..711: note = Synthetic
  source 1..711: mol_type = other DNA

SEQ ID NO: 652 - DNA, 1260 bp, synthetic construct; identical to SEQ ID NO: 532
  misc_feature 1..1260: note = Synthetic
  source 1..1260: mol_type = other DNA

SEQ ID NO: 653 - DNA, 1935 bp, synthetic construct
  misc_feature 1..1935: note = Synthetic
  source 1..1935: mol_type = other DNA
atggacatgagggtgcccgctcagctcctggggctcctgctgctgtggctgagaggtgcgcgctgtcaggtgcagctggtgcagtctggggctgaggtgaagaagcctggggcctcagtgaaggtgtcctgcaaggcttctggatacaccttcacccgttatgatatcaactgggtgcgacaggccactggacaagggcttgagtggatgggatggctgaaccctaatagtggtaacacaggccagacacagaagttccggggcagagtcaccatgaccagggacacctccatcaatacagcctacatggagctgagcagcctgagatctgaggacacggccgtgtattactgtgcgagaggggggtataccagtgcctggagatggtacttcgatctctggggccgtggcaccctggtcactgtctcctcagcctccaccaagggcccatcggtcttccccctggcaccctcctccaagagcacctctgggggcacagcggccctgggctgcctggtcaaggactacttccccgaaccggtgacggtgtcgtggaactcaggcgccctgaccagcggcgtgcacaccttcccggctgtcctacagtcctcaggactctactccctcagcagcgtggtgaccgtgccctccagcagcttgggcacccagacctacatctgcaacgtgaatcacaagcccagcaacaccaaggtggacaagaaagttgagcccaaatcttgtgacaaaactcacacatgcccaccgtgcccagcacctgaactcctggggggaccgtcagtcttcctcttccccccaaaacccaaggacaccctcatgatctcccggacccctgaggtcacatgcgtggtggtggacgtgagccacgaagaccctgaggtcaagttcaactggtacgtggacggcgtggaggtgcataatgccaagacaaagccgtgcgaggagcagtacggcagcacgtaccgttgcgtcagcgtcctcaccgtcctgcaccaggactggctgaatggcaaggagtacaagtgcaaggtgtccaacaaagccctcccagcccccatcgagaaaaccatctccaaagccaaagggcagccccgagaaccacaggtgtacaccctgcccccatcccggaaggagatgaccaagaaccaggtcagcctgacctgcctggtcaaaggcttctatcccagcgacatcgccgtggagtgggagagcaatgggcagccggagaacaactacaagaccacgcctcccgtgctgaagtccgacggctccttcttcctctatagcaagctcaccgtggacaagagcaggtggcagcaggggaacgtcttctcatgctccgtgatgcatgaggctctgcacaaccactacacgcagaagagcctctccctgtctcccgggggaggcggtggatcctctccaggtcaaggtactcaatccgaaaactcctgcacccacttcccgggtaacctgccgaacatgctgcgtgacctgcgtgacgctttctcccgtgttaaaaccttcttccagatgaaagaccagctggacaacctgctgctgaaagaatccctgctggaagacttcaaaggttacctgggttgtcaggctctgtccgaaatgatccagttctacctggaagaagttatgccgcaggctgaaaaccaggacccggacatcaaagctcacgttaactccctgggtgaaaacctgaaaaccctgcgtctgcgtctgcgccgttgccatcgattcctgccgtgcgaaaacggtggcggttctggtggtaaatccaaagctgttgaacaggttaaaaacgctttcaacaaactgcaggaaaaaggtatctacgacgctatgtccgaattcgacatcttcatcaactacatcgaagcttacatgaccatgaaaatccgtaactag

SEQ ID NO: 654 - DNA, 711 bp, synthetic construct; identical to SEQ ID NO: 384
  misc_feature 1..711: note = Synthetic
  source 1..711: mol_type = other DNA

SEQ ID NO: 655 - DNA, 1260 bp, synthetic construct; identical to SEQ ID NO: 535
  misc_feature 1..1260: note = Synthetic
  source 1..1260: mol_type = other DNA

SEQ ID NO: 656 - DNA, 1935 bp, synthetic construct
  misc_feature 1..1935: note = Synthetic
  source 1..1935: mol_type = other DNA
atggacatgagggtgcccgctcagctcctggggctcctgctgctgtggctgagaggtgcgcgctgtcaggtgcagctggtgcagtctggggctgaggtgaagaagcctggggcctcagtgaaggtgtcctgcaaggcttctggatacaccttcacccgttatgatatcaactgggtgcgacaggccactggacaagggcttgagtggatgggatggctgaaccctaatagtggtaacacaggccagacacagaagttccggggcagagtcaccatgaccagggacacctccatcaatacagcctacatggagctgagcagcctgagatctgaggacacggccgtgtattactgtgcgagaggggggtataccagtgcctggagatggtacttcgatctctggggccgtggcaccctggtcactgtctcctcagcctccaccaagggcccatcggtcttccccctggcaccctcctccaagagcacctctgggggcacagcggccctgggctgcctggtcaaggactacttccccgaaccggtgacggtgtcgtggaactcaggcgccctgaccagcggcgtgcacaccttcccggctgtcctacagtcctcaggactctactccctcagcagcgtggtgaccgtgccctccagcagcttgggcacccagacctacatctgcaacgtgaatcacaagcccagcaacaccaaggtggacaagaaagttgagcccaaatcttgtgacaaaactcacacatgcccaccgtgcccagcacctgaactcctggggggaccgtcagtcttcctcttccccccaaaacccaaggacaccctcatgatctcccggacccctgaggtcacatgcgtggtggtggacgtgagccacgaagaccctgaggtcaagttcaactggtacgtggacggcgtggaggtgcataatgccaagacaaagccgtgcgaggagcagtacggcagcacgtaccgttgcgtcagcgtcctcaccgtcctgcaccaggactggctgaatggcaaggagtacaagtgcaaggtgtccaacaaagccctcccagcccccatcgagaaaaccatctccaaagccaaagggcagccccgagaaccacaggtgtacaccctgcccccatcccggaaggagatgaccaagaaccaggtcagcctgacctgcctggtcaaaggcttctatcccagcgacatcgccgtggagtgggagagcaatgggcagccggagaacaactacaagaccacgcctcccgtgctgaagtccgacggctccttcttcctctatagcaagctcaccgtggacaagagcaggtggcagcaggggaacgtcttctcatgctccgtgatgcatgaggctctgcacaaccactacacgcagaagagcctctccctgtctcccgggggaggcggtggatcctctccaggtcaaggtactcaatccgaaaactcctgcacccacttcccgggtaacctgccgaacatgctgcgtgacctgcgtgacgctttctcccgtgttaaaaccttcttccagatgaaaggccagctggacaacctgctgctgaaagaatccctgctggaagacttcaaaggttacctgggttgtcaggctctgtccgaaatgatccagttctacctggaagaagttatgccgcaggctgaaaaccaggacccggacatcaaagctcacgttaactccctgggtgaaaacctgaaaaccctgcgtctgcgtctgcgccgttgccatcgattcctgccgtgcgaaaacggtggcggttctggtggtaaatccaaagctgttgaacaggttaaaaacgctttcaacaaactgcaggaaaaaggtatctacaaagctatgtccgaattcgacatcttcatcaactacatcgaagcttacatgaccatgaaaatccgtaactag

SEQ ID NO: 657 - DNA, 711 bp, synthetic construct; identical to SEQ ID NO: 384
  misc_feature 1..711: note = Synthetic
  source 1..711: mol_type = other DNA

SEQ ID NO: 658 - DNA, 1260 bp, synthetic construct; identical to SEQ ID NO: 538
  misc_feature 1..1260: note = Synthetic
  source 1..1260: mol_type = other DNA

SEQ ID NO: 659 - DNA, 1935 bp, synthetic construct
  misc_feature 1..1935: note = Synthetic
  source 1..1935: mol_type = other DNA
atggacatgagggtgcccgctcagctcctggggctcctgctgctgtggctgagaggtgcgcgctgtcaggtgcagctggtgcagtctggggctgaggtgaagaagcctggggcctcagtgaaggtgtcctgcaaggcttctggatacaccttcacccgttatgatatcaactgggtgcgacaggccactggacaagggcttgagtggatgggatggctgaaccctaatagtggtaacacaggccagacacagaagttccggggcagagtcaccatgaccagggacacctccatcaatacagcctacatggagctgagcagcctgagatctgaggacacggccgtgtattactgtgcgagaggggggtataccagtgcctggagatggtacttcgatctctggggccgtggcaccctggtcactgtctcctcagcctccaccaagggcccatcggtcttccccctggcaccctcctccaagagcacctctgggggcacagcggccctgggctgcctggtcaaggactacttccccgaaccggtgacggtgtcgtggaactcaggcgccctgaccagcggcgtgcacaccttcccggctgtcctacagtcctcaggactctactccctcagcagcgtggtgaccgtgccctccagcagcttgggcacccagacctacatctgcaacgtgaatcacaagcccagcaacaccaaggtggacaagaaagttgagcccaaatcttgtgacaaaactcacacatgcccaccgtgcccagcacctgaactcctggggggaccgtcagtcttcctcttccccccaaaacccaaggacaccctcatgatctcccggacccctgaggtcacatgcgtggtggtggacgtgagccacgaagaccctgaggtcaagttcaactggtacgtggacggcgtggaggtgcataatgccaagacaaagccgtgcgaggagcagtacggcagcacgtaccgttgcgtcagcgtcctcaccgtcctgcaccaggactggctgaatggcaaggagtacaagtgcaaggtgtccaacaaagccctcccagcccccatcgagaaaaccatctccaaagccaaagggcagccccgagaaccacaggtgtacaccctgcccccatcccggaaggagatgaccaagaaccaggtcagcctgacctgcctggtcaaaggcttctatcccagcgacatcgccgtggagtgggagagcaatgggcagccggagaacaactacaagaccacgcctcccgtgctgaagtccgacggctccttcttcctctatagcaagctcaccgtggacaagagcaggtggcagcaggggaacgtcttctcatgctccgtgatgcatgaggctctgcacaaccactacacgcagaagagcctctccctgtctcccgggggaggcggtggatcctctccaggtcaaggtactcaatccgaaaactcctgcacccacttcccgggtaacctgccgaacatgctgcgtgacctgcgtgacgctttctcccgtgttaaaaccttcttccggatgaaagaccagctggacaacctgctgctgaaagaatccctgctggaagacttcaaaggttacctgggttgtcaggctctgtccgaaatgatccagttctacctggaagaagttatgccgcaggctgaaaaccaggacccggacatcaaagctcacgttaactccctgggtgaaaacctgaaaaccctgcgtctgcgtctgcgccgttgccatcgattcctgccgtgcgaaaacggtggcggttctggtggtaaatccaaagctgttgaacaggttaaaaacgctttcaacaaactgcaggaaaaaggtatctacaaagctatgtccgaattcgacatcttcatcaactacatcgaagcttacatgaccatgaaaatccgtaactag

SEQ ID NO: 660 - DNA, 711 bp, synthetic construct; identical to SEQ ID NO: 384
  misc_feature 1..711: note = Synthetic
  source 1..711: mol_type = other DNA

SEQ ID NO: 661 - DNA, 1260 bp, synthetic construct; identical to SEQ ID NO: 541
  misc_feature 1..1260: note = Synthetic
  source 1..1260: mol_type = other DNA

SEQ ID NO: 662 - DNA, 1935 bp, synthetic construct
  misc_feature 1..1935: note = Synthetic
  source 1..1935: mol_type = other DNA
atggacatgagggtgcccgctcagctcctggggctcctgctgctgtggctgagaggtgcgcgctgtcaggtgcagctggtgcagtctggggctgaggtgaagaagcctggggcctcagtgaaggtgtcctgcaaggcttctggatacaccttcacccgttatgatatcaactgggtgcgacaggccactggacaagggcttgagtggatgggatggctgaaccctaatagtggtaacacaggccagacacagaagttccggggcagagtcaccatgaccagggacacctccatcaatacagcctacatggagctgagcagcctgagatctgaggacacggccgtgtattactgtgcgagaggggggtataccagtgcctggagatggtacttcgatctctggggccgtggcaccctggtcactgtctcctcagcctccaccaagggcccatcggtcttccccctggcaccctcctccaagagcacctctgggggcacagcggccctgggctgcctggtcaaggactacttccccgaaccggtgacggtgtcgtggaactcaggcgccctgaccagcggcgtgcacaccttcccggctgtcctacagtcctcaggactctactccctcagcagcgtggtgaccgtgccctccagcagcttgggcacccagacctacatctgcaacgtgaatcacaagcccagcaacaccaaggtggacaagaaagttgagcccaaatcttgtgacaaaactcacacatgcccaccgtgcccagcacctgaactcctggggggaccgtcagtcttcctcttccccccaaaacccaaggacaccctcatgatctcccggacccctgaggtcacatgcgtggtggtggacgtgagccacgaagaccctgaggtcaagttcaactggtacgtggacggcgtggaggtgcataatgccaagacaaagccgtgcgaggagcagtacggcagcacgtaccgttgcgtcagcgtcctcaccgtcctgcaccaggactggctgaatggcaaggagtacaagtgcaaggtgtccaacaaagccctcccagcccccatcgagaaaaccatctccaaagccaaagggcagccccgagaaccacaggtgtacaccctgcccccatcccggaaggagatgaccaagaaccaggtcagcctgacctgcctggtcaaaggcttctatcccagcgacatcgccgtggagtgggagagcaatgggcagccggagaacaactacaagaccacgcctcccgtgctgaagtccgacggctccttcttcctctatagcaagctcaccgtggacaagagcaggtggcagcaggggaacgtcttctcatgctccgtgatgcatgaggctctgcacaaccactacacgcagaagagcctctccctgtctcccgggggaggcggtggatcctctccaggtcaaggtactcaatccgaaaactcctgcacccacttcccgggtaacctgccgaacatgctgcgtgacctgcgtgacgctttctcccgtgttaaaaccttcttccagatgaaagaccagctggacaacaagctgctgaaagaatccctgctggaagacttcaaaggttacctgggttgtcaggctctgtccgaaatgatccagttctacctggaagaagttatgccgcaggctgaaaaccaggacccggacatcaaagctcacgttaactccctgggtgaaaacctgaaaaccctgcgtctgcgtctgcgccgttgccatcgattcctgccgtgcgaaaacggtggcggttctggtggtaaatccaaagctgttgaacaggttaaaaacgctttcaacaaactgcaggaaaaaggtatctacaaagctatgtccgaattcgacatcttcatcaactacatcgaagcttacatgaccatgaaaatccgtaactag

SEQ ID NO: 663 - DNA, 711 bp, synthetic construct; identical to SEQ ID NO: 384
  misc_feature 1..711: note = Synthetic
  source 1..711: mol_type = other DNA

SEQ ID NO: 664 - DNA, 1260 bp, synthetic construct; identical to SEQ ID NO: 544
  misc_feature 1..1260: note = Synthetic
  source 1..1260: mol_type = other DNA

SEQ ID NO: 665 - DNA, 1935 bp, synthetic construct
  misc_feature 1..1935: note = Synthetic
  source 1..1935: mol_type = other DNA
atggacatgagggtgcccgctcagctcctggggctcctgctgctgtggctgagaggtgcgcgctgtcaggtgcagctggtgcagtctggggctgaggtgaagaagcctggggcctcagtgaaggtgtcctgcaaggcttctggatacaccttcacccgttatgatatcaactgggtgcgacaggccactggacaagggcttgagtggatgggatggctgaaccctaatagtggtaacacaggccagacacagaagttccggggcagagtcaccatgaccagggacacctccatcaatacagcctacatggagctgagcagcctgagatctgaggacacggccgtgtattactgtgcgagaggggggtataccagtgcctggagatggtacttcgatctctggggccgtggcaccctggtcactgtctcctcagcctccaccaagggcccatcggtcttccccctggcaccctcctccaagagcacctctgggggcacagcggccctgggctgcctggtcaaggactacttccccgaaccggtgacggtgtcgtggaactcaggcgccctgaccagcggcgtgcacaccttcccggctgtcctacagtcctcaggactctactccctcagcagcgtggtgaccgtgccctccagcagcttgggcacccagacctacatctgcaacgtgaatcacaagcccagcaacaccaaggtggacaagaaagttgagcccaaatcttgtgacaaaactcacacatgcccaccgtgcccagcacctgaactcctggggggaccgtcagtcttcctcttccccccaaaacccaaggacaccctcatgatctcccggacccctgaggtcacatgcgtggtggtggacgtgagccacgaagaccctgaggtcaagttcaactggtacgtggacggcgtggaggtgcataatgccaagacaaagccgtgcgaggagcagtacggcagcacgtaccgttgcgtcagcgtcctcaccgtcctgcaccaggactggctgaatggcaaggagtacaagtgcaaggtgtccaacaaagccctcccagcccccatcgagaaaaccatctccaaagccaaagggcagccccgagaaccacaggtgtacaccctgcccccatcccggaaggagatgaccaagaaccaggtcagcctgacctgcctggtcaaaggcttctatcccagcgacatcgccgtggagtgggagagcaatgggcagccggagaacaactacaagaccacgcctcccgtgctgaagtccgacggctccttcttcctctatagcaagctcaccgtggacaagagcaggtggcagcaggggaacgtcttctcatgctccgtgatgcatgaggctctgcacaaccactacacgcagaagagcctctccctgtctcccgggggaggcggtggatcctctccaggtcaaggtactcaatccgaaaactcctgcacccacttcccgggtaacctgccgaacatgctgcgtgacctgcgtgacgctttctcccgtgttgacaccttcttccagatgaaagaccagctggacaacctgctgctgaaagaatccctgctggaagacttcaaaggttacctgggttgtcaggctctgtccgaaatgatccagttctacctggaagaagttatgccgcaggctgaaaaccaggacccggacatcaaagctcacgttaactccctgggtgaaaacctgaaaaccctgcgtctgcgtctgcgccgttgccatcgattcctgccgtgcgaaaacggtggcggttctggtggtaaatccaaagctgttgaacaggttaaaaacgctttcaacaaactgcaggaaaaaggtatctacaaagctatgtccgaattcgacatcttcatcaactacatcgaagcttacatgaccatgaaaatccgtaactag

SEQ ID NO: 666 - DNA, 711 bp, synthetic construct; identical to SEQ ID NO: 384
  misc_feature 1..711: note = Synthetic
  source 1..711: mol_type = other DNA

SEQ ID NO: 667 - DNA, 1260 bp, synthetic construct; identical to SEQ ID NO: 547
  misc_feature 1..1260: note = Synthetic
  source 1..1260: mol_type = other DNA

SEQ ID NO: 668 - DNA, 1935 bp, synthetic construct
  misc_feature 1..1935: note = Synthetic
  source 1..1935: mol_type = other DNA
atggacatgagggtgcccgctcagctcctggggctcctgctgctgtggctgagaggtgcgcgctgtcaggtgcagctggtgcagtctggggctgaggtgaagaagcctggggcctcagtgaaggtgtcctgcaaggcttctggatacaccttcacccgttatgatatcaactgggtgcgacaggccactggacaagggcttgagtggatgggatggctgaaccctaatagtggtaacacaggccagacacagaagttccggggcagagtcaccatgaccagggacacctccatcaatacagcctacatggagctgagcagcctgagatctgaggacacggccgtgtattactgtgcgagaggggggtataccagtgcctggagatggtacttcgatctctggggccgtggcaccctggtcactgtctcctcagcctccaccaagggcccatcggtcttccccctggcaccctcctccaagagcacctctgggggcacagcggccctgggctgcctggtcaaggactacttccccgaaccggtgacggtgtcgtggaactcaggcgccctgaccagcggcgtgcacaccttcccggctgtcctacagtcctcaggactctactccctcagcagcgtggtgaccgtgccctccagcagcttgggcacccagacctacatctgcaacgtgaatcacaagcccagcaacaccaaggtggacaagaaagttgagcccaaatcttgtgacaaaactcacacatgcccaccgtgcccagcacctgaactcctggggggaccgtcagtcttcctcttccccccaaaacccaaggacaccctcatgatctcccggacccctgaggtcacatgcgtggtggtggacgtgagccacgaagaccctgaggtcaagttcaactggtacgtggacggcgtggaggtgcataatgccaagacaaagccgtgcgaggagcagtacggcagcacgtaccgttgcgtcagcgtcctcaccgtcctgcaccaggactggctgaatggcaaggagtacaagtgcaaggtgtccaacaaagccctcccagcccccatcgagaaaaccatctccaaagccaaagggcagccccgagaaccacaggtgtacaccctgcccccatcccggaaggagatgaccaagaaccaggtcagcctgacctgcctggtcaaaggcttctatcccagcgacatcgccgtggagtgggagagcaatgggcagccggagaacaactacaagaccacgcctcccgtgctgaagtccgacggctccttcttcctctatagcaagctcaccgtggacaagagcaggtggcagcaggggaacgtcttctcatgctccgtgatgcatgaggctctgcacaaccactacacgcagaagagcctctccctgtctcccgggggaggcggtggatcctctccaggtcaaggtactcaatccgaaaactcctgcacccacttcccgggtaacctgccgaacatgctgcgtgacctgcgtgacgctttctcccgtgttaaaaccttcttcgagatgaaagaccagctggacaacctgctgctgaaagaatccctgctggaagacttcaaaggttacctgggttgtcaggctctgtccgaaatgatccagttctacctggaagaagttatgccgcaggctgaaaaccaggacccggacatcaaagctcacgttaactccctgggtgaaaacctgaaaaccctgcgtctgcgtctgcgccgttgccatcgattcctgccgtgcgaaaacggtggcggttctggtggtaaatccaaagctgttgaacaggttaaaaacgctttcaacaaactgcaggaaaaaggtatctacaaagctatgtccgaattcgacatcttcatcaactacatcgaagcttacatgaccatgaaaatccgtaactag

SEQ ID NO: 669 - DNA, 711 bp, synthetic construct; identical to SEQ ID NO: 384
  misc_feature 1..711: note = Synthetic
  source 1..711: mol_type = other DNA

SEQ ID NO: 670 - DNA, 1260 bp, synthetic construct; identical to SEQ ID NO: 550
  misc_feature 1..1260: note = Synthetic
  source 1..1260: mol_type = other DNA

SEQ ID NO: 671 - DNA, 1938 bp, synthetic construct
  misc_feature 1..1938: note = Synthetic
  source 1..1938: mol_type = other DNA
atggacatgagggtgcccgctcagctcctggggctcctgctgctgtggctgagaggtgcgcgctgtcaggtgcagctggtgcagtctggggctgaggtgaagaagcctggggcctcagtgaaggtgtcctgcaaggcttctggatacaccttcaccagttatgatatcaattgggtgcgacaggccactggacaagggcttgagtggatgggatggatgaaccctaacagtggtaactcaggctctgtaaagaagttccgggacagagtcaccatgaccagggacacctccatcagcactgcctacatggaattgagcagcctgagatctgaggacacggccgtgtattactgtgtgagacttatcgggtatagcagtgcctggaagtggtccttccagcactggggccagggcaccctggtcaccgtgtcctcagcctccaccaagggcccatcggtcttccccctggcaccctcctccaagagcacctctgggggcacagcggccctgggctgcctggtcaaggactacttccccgaaccggtgacggtgtcgtggaactcaggcgccctgaccagcggcgtgcacaccttcccggctgtcctacagtcctcaggactctactccctcagcagcgtggtgaccgtgccctccagcagcttgggcacccagacctacatctgcaacgtgaatcacaagcccagcaacaccaaggtggacaagaaagttgagcccaaatcttgtgacaaaactcacacatgcccaccgtgcccagcacctgaactcctggggggaccgtcagtcttcctcttccccccaaaacccaaggacaccctcatgatctcccggacccctgaggtcacatgcgtggtggtggacgtgagccacgaagaccctgaggtcaagttcaactggtacgtggacggcgtggaggtgcataatgccaagacaaagccgtgcgaggagcagtacggcagcacgtaccgttgcgtcagcgtcctcaccgtcctgcaccaggactggctgaatggcaaggagtacaagtgcaaggtgtccaacaaagccctcccagcccccatcgagaaaaccatctccaaagccaaagggcagccccgagaaccacaggtgtacaccctgcccccatcccggaaggagatgaccaagaaccaggtcagcctgacctgcctggtcaaaggcttctatcccagcgacatcgccgtggagtgggagagcaatgggcagccggagaacaactacaagaccacgcctcccgtgctgaagtccgacggctccttcttcctctatagcaagctcaccgtggacaagagcaggtggcagcaggggaacgtcttctcatgctccgtgatgcatgaggctctgcacaaccactacacgcagaagagcctctccctgtctcccgggggaggcggtggatcctctccaggtcaaggtactcaatccgaaaactcctgcacccacttcccgggtaacctgccgaacatgctgcgtgacctgcttgacgctttctcccgtgttaaaaccttcttccagatgaaagaccagctggacaacctgctgctgaaagaatccctgctggaagacttcaaaggttacctgggttgtcaggctctgtccgaaatgatccagttctacctggaagaagttatgccgcaggctgaaaaccaggacccggacatcaaagctcacgttaactccctgggtgaaaacctgaaaaccctgcgtctgcgtctgcgccgttgccatcgattcctgccgtgcgaaaacggtggcggttctggtggtaaatccaaagctgttgaacaggttaaaaacgctttcaacaaactgcaggaaaaaggtatctacaaagctatgtccgaattcgacatcttcatcaactacatcgaagcttacatgaccatgaaaatccgtaactag

SEQ ID NO: 672 - DNA, 711 bp, synthetic construct; identical to SEQ ID NO: 400
  misc_feature 1..711: note = Synthetic
  source 1..711: mol_type = other DNA

SEQ ID NO: 673 - DNA, 1260 bp, synthetic construct; identical to SEQ ID NO: 544
  misc_feature 1..1260: note = Synthetic
  source 1..1260: mol_type = other DNA

SEQ ID NO: 674 - DNA, 1938 bp, synthetic construct
  misc_feature 1..1938: note = Synthetic
  source 1..1938: mol_type = other DNA
atggacatgagggtgcccgctcagctcctggggctcctgctgctgtggctgagaggtgcgcgctgtcaggtgcagctggtgcagtctggggctgaggtgaagaagcctggggcctcagtgaaggtgtcctgcaaggcttctggatacaccttcaccagttatgatatcaattgggtgcgacaggccactggacaagggcttgagtggatgggatggatgaaccctaacagtggtaactcaggctctgtaaagaagttccgggacagagtcaccatgaccagggacacctccatcagcactgcctacatggaattgagcagcctgagatctgaggacacggccgtgtattactgtgtgagacttatcgggtatagcagtgcctggaagtggtccttccagcactggggccagggcaccctggtcaccgtgtcctcagcctccaccaagggcccatcggtcttccccctggcaccctcctccaagagcacctctgggggcacagcggccctgggctgcctggtcaaggactacttccccgaaccggtgacggtgtcgtggaactcaggcgccctgaccagcggcgtgcacaccttcccggctgtcctacagtcctcaggactctactccctcagcagcgtggtgaccgtgccctccagcagcttgggcacccagacctacatctgcaacgtgaatcacaagcccagcaacaccaaggtggacaagaaagttgagcccaaatcttgtgacaaaactcacacatgcccaccgtgcccagcacctgaactcctggggggaccgtcagtcttcctcttccccccaaaacccaaggacaccctcatgatctcccggacccctgaggtcacatgcgtggtggtggacgtgagccacgaagaccctgaggtcaagttcaactggtacgtggacggcgtggaggtgcataatgccaagacaaagccgtgcgaggagcagtacggcagcacgtaccgttgcgtcagcgtcctcaccgtcctgcaccaggactggctgaatggcaaggagtacaagtgcaaggtgtccaacaaagccctcccagcccccatcgagaaaaccatctccaaagccaaagggcagccccgagaaccacaggtgtacaccctgcccccatcccggaaggagatgaccaagaaccaggtcagcctgacctgcctggtcaaaggcttctatcccagcgacatcgccgtggagtgggagagcaatgggcagccggagaacaactacaagaccacgcctcccgtgctgaagtccgacggctccttcttcctctatagcaagctcaccgtggacaagagcaggtggcagcaggggaacgtcttctcatgctccgtgatgcatgaggctctgcacaaccactacacgcagaagagcctctccctgtctcccgggggaggcggtggatcctctccaggtcaaggtactcaatccgaaaactcctgcacccacttcccgggtaacctgccgaacatgctgcgtgacctgcgtgacgctttctcccgtgttaaaaccttcttccagatgaaagaccagctggacaacctgctgctgaaagaatccctgctggaagacttcaaaggttacctgggttgtcaggctctgtccgaaatgatccagttctacctggaagaagttatgccgcaggctgaaaaccaggacccggacatcaaagctcacgttaactccctgggtgaaaacctgaaaaccctgcgtctgcgtctgcgccgttgccatcgattcctgccgtgcgaaaacggtggcggttctggtggtaaatccaaagctgttgaacaggttaaaaacgctttcaacaaactgcaggaaaaaggtatctacttagctatgtccgaattcgacatcttcatcaactacatcgaagcttacatgaccatgaaaatccgtaactag

SEQ ID NO: 675 - DNA, 711 bp, synthetic construct; identical to SEQ ID NO: 400
  misc_feature 1..711: note = Synthetic
  source 1..711: mol_type = other DNA

SEQ ID NO: 676 - DNA, 1260 bp, synthetic construct; identical to SEQ ID NO: 538
  misc_feature 1..1260: note = Synthetic
  source 1..1260: mol_type = other DNA

SEQ ID NO: 677 - DNA, 1938 bp, synthetic construct
  misc_feature 1..1938: note = Synthetic
  source 1..1938: mol_type = other DNA
atggacatgagggtgcccgctcagctcctggggctcctgctgctgtggctgagaggtgcgcgctgtcaggtgcagctggtgcagtctggggctgaggtgaagaagcctggggcctcagtgaaggtgtcctgcaaggcttctggatacaccttcaccagttatgatatcaattgggtgcgacaggccactggacaagggcttgagtggatgggatggatgaaccctaacagtggtaactcaggctctgtaaagaagttccgggacagagtcaccatgaccagggacacctccatcagcactgcctacatggaattgagcagcctgagatctgaggacacggccgtgtattactgtgtgagacttatcgggtatagcagtgcctggaagtggtccttccagcactggggccagggcaccctggtcaccgtgtcctcagcctccaccaagggcccatcggtcttccccctggcaccctcctccaagagcacctctgggggcacagcggccctgggctgcctggtcaaggactacttccccgaaccggtgacggtgtcgtggaactcaggcgccctgaccagcggcgtgcacaccttcccggctgtcctacagtcctcaggactctactccctcagcagcgtggtgaccgtgccctccagcagcttgggcacccagacctacatctgcaacgtgaatcacaagcccagcaacaccaaggtggacaagaaagttgagcccaaatcttgtgacaaaactcacacatgcccaccgtgcccagcacctgaactcctggggggaccgtcagtcttcctcttccccccaaaacccaaggacaccctcatgatctcccggacccctgaggtcacatgcgtggtggtggacgtgagccacgaagaccctgaggtcaagttcaactggtacgtggacggcgtggaggtgcataatgccaagacaaagccgtgcgaggagcagtacggcagcacgtaccgttgcgtcagcgtcctcaccgtcctgcaccaggactggctgaatggcaaggagtacaagtgcaaggtgtccaacaaagccctcccagcccccatcgagaaaaccatctccaaagccaaagggcagccccgagaaccacaggtgtacaccctgcccccatcccggaaggagatgaccaagaaccaggtcagcctgacctgcctggtcaaaggcttctatcccagcgacatcgccgtggagtgggagagcaatgggcagccggagaacaactacaagaccacgcctcccgtgctgaagtccgacggctccttcttcctctatagcaagctcaccgtggacaagagcaggtggcagcaggggaacgtcttctcatgctccgtgatgcatgaggctctgcacaaccactacacgcagaagagcctctccctgtctcccgggggaggcggtggatcctctccaggtcaaggtactcaatccgaaaactcctgcacccacttcccgggtaacctgccgaacatgctgcgtgacctgcgtgacgctttctcccgtgttaaaaccttcttccagatgaaagaccagctggacaacctgctgctgaaagaatccctgctggaagacttcaaaggttacctgggttgtcaggctctgtccgaaatgatccagttctacctggaagaagttatgccgcaggctgaaaaccaggacccggacatcaaagctcacgttaactccctgggtgaaaacctgaaaaccctgcgtctgcgtctgcgccgttgccatcgattcctgccgtgcgaaaacggtggcggttctggtggtaaatccaaagctgttgaacaggttaaaaacgctttcaacaaactgcaggaaaaaggtatctacgacgctatgtccgaattcgacatcttcatcaactacatcgaagcttacatgaccatgaaaatccgtaactag

SEQ ID NO: 678 - DNA, 711 bp, synthetic construct; identical to SEQ ID NO: 400
  misc_feature 1..711: note = Synthetic
  source 1..711: mol_type = other DNA

SEQ ID NO: 679 - DNA, 1260 bp, synthetic construct; identical to SEQ ID NO: 529
  misc_feature 1..1260: note = Synthetic
  source 1..1260: mol_type = other DNA

SEQ ID NO: 680 - DNA, 1938 bp, synthetic construct
  misc_feature 1..1938: note = Synthetic
  source 1..1938: mol_type = other DNA
atggacatgagggtgcccgctcagctcctggggctcctgctgctgtggctgagaggtgcgcgctgtcaggtgcagctggtgcagtctggggctgaggtgaagaagcctggggcctcagtgaaggtgtcctgcaaggcttctggatacaccttcaccagttatgatatcaattgggtgcgacaggccactggacaagggcttgagtggatgggatggatgaaccctaacagtggtaactcaggctctgtaaagaagttccgggacagagtcaccatgaccagggacacctccatcagcactgcctacatggaattgagcagcctgagatctgaggacacggccgtgtattactgtgtgagacttatcgggtatagcagtgcctggaagtggtccttccagcactggggccagggcaccctggtcaccgtgtcctcagcctccaccaagggcccatcggtcttccccctggcaccctcctccaagagcacctctgggggcacagcggccctgggctgcctggtcaaggactacttccccgaaccggtgacggtgtcgtggaactcaggcgccctgaccagcggcgtgcacaccttcccggctgtcctacagtcctcaggactctactccctcagcagcgtggtgaccgtgccctccagcagcttgggcacccagacctacatctgcaacgtgaatcacaagcccagcaacaccaaggtggacaagaaagttgagcccaaatcttgtgacaaaactcacacatgcccaccgtgcccagcacctgaactcctggggggaccgtcagtcttcctcttccccccaaaacccaaggacaccctcatgatctcccggacccctgaggtcacatgcgtggtggtggacgtgagccacgaagaccctgaggtcaagttcaactggtacgtggacggcgtggaggtgcataatgccaagacaaagccgtgcgaggagcagtacggcagcacgtaccgttgcgtcagcgtcctcaccgtcctgcaccaggactggctgaatggcaaggagtacaagtgcaaggtgtccaacaaagccctcccagcccccatcgagaaaaccatctccaaagccaaagggcagccccgagaaccacaggtgtacaccctgcccccatcccggaaggagatgaccaagaaccaggtcagcctgacctgcctggtcaaaggcttctatcccagcgacatcgccgtggagtgggagagcaatgggcagccggagaacaactacaagaccacgcctcccgtgctgaagtccgacggctccttcttcctctatagcaagctcaccgtggacaagagcaggtggcagcaggggaacgtcttctcatgctccgtgatgcatgaggctctgcacaaccactacacgcagaagagcctctccctgtctcccgggggaggcggtggatcctctccaggtcaaggtactcaatccgaaaactcctgcacccacttcccgggtaacctgccgaacatgctgcgtgacctgcgtgacgctttctcccgtgttaaaaccttcttccagatgaaaggccagctggacaacctgctgctgaaagaatccctgctggaagacttcaaaggttacctgggttgtcaggctctgtccgaaatgatccagttctacctggaagaagttatgccgcaggctgaaaaccaggacccggacatcaaagctcacgttaactccctgggtgaaaacctgaaaaccctgcgtctgcgtctgcgccgttgccatcgattcctgccgtgcgaaaacggtggcggttctggtggtaaatccaaagctgttgaacaggttaaaaacgctttcaacaaactgcaggaaaaaggtatctacaaagctatgtccgaattcgacatcttcatcaactacatcgaagcttacatgaccatgaaaatccgtaactag

SEQ ID NO: 681 - DNA, 711 bp, synthetic construct; identical to SEQ ID NO: 400
  misc_feature 1..711: note = Synthetic
  source 1..711: mol_type = other DNA

SEQ ID NO: 682 - DNA, 1260 bp, synthetic construct; identical to SEQ ID NO: 550
  misc_feature 1..1260: note = Synthetic
  source 1..1260: mol_type = other DNA

SEQ ID NO: 683 - DNA, 1938 bp, synthetic construct
  misc_feature 1..1938: note = Synthetic
  source 1..1938: mol_type = other DNA
atggacatgagggtgcccgctcagctcctggggctcctgctgctgtggctgagaggtgcgcgctgtcaggtgcagctggtgcagtctggggctgaggtgaagaagcctggggcctcagtgaaggtgtcctgcaaggcttctggatacaccttcaccagttatgatatcaattgggtgcgacaggccactggacaagggcttgagtggatgggatggatgaaccctaacagtggtaactcaggctctgtaaagaagttccgggacagagtcaccatgaccagggacacctccatcagcactgcctacatggaattgagcagcctgagatctgaggacacggccgtgtattactgtgtgagacttatcgggtatagcagtgcctggaagtggtccttccagcactggggccagggcaccctggtcaccgtgtcctcagcctccaccaagggcccatcggtcttccccctggcaccctcctccaagagcacctctgggggcacagcggccctgggctgcctggtcaaggactacttccccgaaccggtgacggtgtcgtggaactcaggcgccctgaccagcggcgtgcacaccttcccggctgtcctacagtcctcaggactctactccctcagcagcgtggtgaccgtgccctccagcagcttgggcacccagacctacatctgcaacgtgaatcacaagcccagcaacaccaaggtggacaagaaagttgagcccaaatcttgtgacaaaactcacacatgcccaccgtgcccagcacctgaactcctggggggaccgtcagtcttcctcttccccccaaaacccaaggacaccctcatgatctcccggacccctgaggtcacatgcgtggtggtggacgtgagccacgaagaccctgaggtcaagttcaactggtacgtggacggcgtggaggtgcataatgccaagacaaagccgtgcgaggagcagtacggcagcacgtaccgttgcgtcagcgtcctcaccgtcctgcaccaggactggctgaatggcaaggagtacaagtgcaaggtgtccaacaaagccctcccagcccccatcgagaaaaccatctccaaagccaaagggcagccccgagaaccacaggtgtacaccctgcccccatcccggaaggagatgaccaagaaccaggtcagcctgacctgcctggtcaaaggcttctatcccagcgacatcgccgtggagtgggagagcaatgggcagccggagaacaactacaagaccacgcctcccgtgctgaagtccgacggctccttcttcctctatagcaagctcaccgtggacaagagcaggtggcagcaggggaacgtcttctcatgctccgtgatgcatgaggctctgcacaaccactacacgcagaagagcctctccctgtctcccgggggaggcggtggatcctctccaggtcaaggtactcaatccgaaaactcctgcacccacttcccgggtaacctgccgaacatgctgcgtgacctgcgtgacgctttctcccgtgttaaaaccttcttccggatgaaagaccagctggacaacctgctgctgaaagaatccctgctggaagacttcaaaggttacctgggttgtcaggctctgtccgaaatgatccagttctacctggaagaagttatgccgcaggctgaaaaccaggacccggacatcaaagctcacgttaactccctgggtgaaaacctgaaaaccctgcgtctgcgtctgcgccgttgccatcgattcctgccgtgcgaaaacggtggcggttctggtggtaaatccaaagctgttgaacaggttaaaaacgctttcaacaaactgcaggaaaaaggtatctacaaagctatgtccgaattcgacatcttcatcaactacatcgaagcttacatgaccatgaaaatccgtaactag

SEQ ID NO: 684 - DNA, 711 bp, synthetic construct; identical to SEQ ID NO: 400
  misc_feature 1..711: note = Synthetic
  source 1..711: mol_type = other DNA

SEQ ID NO: 685 - DNA, 1260 bp, synthetic construct; identical to SEQ ID NO: 532
  misc_feature 1..1260: note = Synthetic
  source 1..1260: mol_type = other DNA

SEQ ID NO: 686 - DNA, 1938 bp, synthetic construct
  misc_feature 1..1938: note = Synthetic
  source 1..1938: mol_type = other DNA
atggacatgagggtgcccgctcagctcctggggctcctgctgctgtggctgagaggtgcgcgctgtcaggtgcagctggtgcagtctggggctgaggtgaagaagcctggggcctcagtgaaggtgtcctgcaaggcttctggatacaccttcaccagttatgatatcaattgggtgcgacaggccactggacaagggcttgagtggatgggatggatgaaccctaacagtggtaactcaggctctgtaaagaagttccgggacagagtcaccatgaccagggacacctccatcagcactgcctacatggaattgagcagcctgagatctgaggacacggccgtgtattactgtgtgagacttatcgggtatagcagtgcctggaagtggtccttccagcactggggccagggcaccctggtcaccgtgtcctcagcctccaccaagggcccatcggtcttccccctggcaccctcctccaagagcacctctgggggcacagcggccctgggctgcctggtcaaggactacttccccgaaccggtgacggtgtcgtggaactcaggcgccctgaccagcggcgtgcacaccttcccggctgtcctacagtcctcaggactctactccctcagcagcgtggtgaccgtgccctccagcagcttgggcacccagacctacatctgcaacgtgaatcacaagcccagcaacaccaaggtggacaagaaagttgagcccaaatcttgtgacaaaactcacacatgcccaccgtgcccagcacctgaactcctggggggaccgtcagtcttcctcttccccccaaaacccaaggacaccctcatgatctcccggacccctgaggtcacatgcgtggtggtggacgtgagccacgaagaccctgaggtcaagttcaactggtacgtggacggcgtggaggtgcataatgccaagacaaagccgtgcgaggagcagtacggcagcacgtaccgttgcgtcagcgtcctcaccgtcctgcaccaggactggctgaatggcaaggagtacaagtgcaaggtgtccaacaaagccctcccagcccccatcgagaaaaccatctccaaagccaaagggcagccccgagaaccacaggtgtacaccctgcccccatcccggaaggagatgaccaagaaccaggtcagcctgacctgcctggtcaaaggcttctatcccagcgacatcgccgtggagtgggagagcaatgggcagccggagaacaactacaagaccacgcctcccgtgctgaagtccgacggctccttcttcctctatagcaagctcaccgtggacaagagcaggtggcagcaggggaacgtcttctcatgctccgtgatgcatgaggctctgcacaaccactacacgcagaagagcctctccctgtctcccgggggaggcggtggatcctctccaggtcaaggtactcaatccgaaaactcctgcacccacttcccgggtaacctgccgaacatgctgcgtgacctgcgtgacgctttctcccgtgttaaaaccttcttccagatgaaagaccagctggacaacaagctgctgaaagaatccctgctggaagacttcaaaggttacctgggttgtcaggctctgtccgaaatgatccagttctacctggaagaagttatgccgcaggctgaaaaccaggacccggacatcaaagctcacgttaactccctgggtgaaaacctgaaaaccctgcgtctgcgtctgcgccgttgccatcgattcctgccgtgcgaaaacggtggcggttctggtggtaaatccaaagctgttgaacaggttaaaaacgctttcaacaaactgcaggaaaaaggtatctacaaagctatgtccgaattcgacatcttcatcaactacatcgaagcttacatgaccatgaaaatccgtaactag

SEQ ID NO: 687 - DNA, 711 bp, synthetic construct; identical to SEQ ID NO: 400
  misc_feature 1..711: note = Synthetic
  source 1..711: mol_type = other DNA

SEQ ID NO: 688 - DNA, 1260 bp, synthetic construct; identical to SEQ ID NO: 547
  misc_feature 1..1260: note = Synthetic
  source 1..1260: mol_type = other DNA

SEQ ID NO: 689 - DNA, 1938 bp, synthetic construct
  misc_feature 1..1938: note = Synthetic
  source 1..1938: mol_type = other DNA
atggacatgagggtgcccgctcagctcctggggctcctgctgctgtggctgagaggtgcgcgctgtcaggtgcagctggtgcagtctggggctgaggtgaagaagcctggggcctcagtgaaggtgtcctgcaaggcttctggatacaccttcaccagttatgatatcaattgggtgcgacaggccactggacaagggcttgagtggatgggatggatgaaccctaacagtggtaactcaggctctgtaaagaagttccgggacagagtcaccatgaccagggacacctccatcagcactgcctacatggaattgagcagcctgagatctgaggacacggccgtgtattactgtgtgagacttatcgggtatagcagtgcctggaagtggtccttccagcactggggccagggcaccctggtcaccgtgtcctcagcctccaccaagggcccatcggtcttccccctggcaccctcctccaagagcacctctgggggcacagcggccctgggctgcctggtcaaggactacttccccgaaccggtgacggtgtcgtggaactcaggcgccctgaccagcggcgtgcacaccttcccggctgtcctacagtcctcaggactctactccctcagcagcgtggtgaccgtgccctccagcagcttgggcacccagacctacatctgcaacgtgaatcacaagcccagcaacaccaaggtggacaagaaagttgagcccaaatcttgtgacaaaactcacacatgcccaccgtgcccagcacctgaactcctggggggaccgtcagtcttcctcttccccccaaaacccaaggacaccctcatgatctcccggacccctgaggtcacatgcgtggtggtggacgtgagccacgaagaccctgaggtcaagttcaactggtacgtggacggcgtggaggtgcataatgccaagacaaagccgtgcgaggagcagtacggcagcacgtaccgttgcgtcagcgtcctcaccgtcctgcaccaggactggctgaatggcaaggagtacaagtgcaaggtgtccaacaaagccctcccagcccccatcgagaaaaccatctccaaagccaaagggcagccccgagaaccacaggtgtacaccctgcccccatcccggaaggagatgaccaagaaccaggtcagcctgacctgcctggtcaaaggcttctatcccagcgacatcgccgtggagtgggagagcaatgggcagccggagaacaactacaagaccacgcctcccgtgctgaagtccgacggctccttcttcctctatagcaagctcaccgtggacaagagcaggtggcagcaggggaacgtcttctcatgctccgtgatgcatgaggctctgcacaaccactacacgcagaagagcctctccctgtctcccgggggaggcggtggatcctctccaggtcaaggtactcaatccgaaaactcctgcacccacttcccgggtaacctgccgaacatgctgcgtgacctgcgtgacgctttctcccgtgttgacaccttcttccagatgaaagaccagctggacaacctgctgctgaaagaatccctgctggaagacttcaaaggttacctgggttgtcaggctctgtccgaaatgatccagttctacctggaagaagttatgccgcaggctgaaaaccaggacccggacatcaaagctcacgttaactccctgggtgaaaacctgaaaaccctgcgtctgcgtctgcgccgttgccatcgattcctgccgtgcgaaaacggtggcggttctggtggtaaatccaaagctgttgaacaggttaaaaacgctttcaacaaactgcaggaaaaaggtatctacaaagctatgtccgaattcgacatcttcatcaactacatcgaagcttacatgaccatgaaaatccgtaactag

SEQ ID NO: 690 - DNA, 711 bp, synthetic construct; identical to SEQ ID NO: 400
  misc_feature 1..711: note = Synthetic
  source 1..711: mol_type = other DNA

SEQ ID NO: 691 - DNA, 1260 bp, synthetic construct; identical to SEQ ID NO: 541
  misc_feature 1..1260: note = Synthetic
  source 1..1260: mol_type = other DNA

SEQ ID NO: 692 - DNA, 1938 bp, synthetic construct
  misc_feature 1..1938: note = Synthetic
  source 1..1938: mol_type = other DNA
atggacatgagggtgcccgctcagctcctggggctcctgctgctgtggctgagaggtgcgcgctgtcaggtgcagctggtgcagtctggggctgaggtgaagaagcctggggcctcagtgaaggtgtcctgcaaggcttctggatacaccttcaccagttatgatatcaattgggtgcgacaggccactggacaagggcttgagtggatgggatggatgaaccctaacagtggtaactcaggctctgtaaagaagttccgggacagagtcaccatgaccagggacacctccatcagcactgcctacatggaattgagcagcctgagatctgaggacacggccgtgtattactgtgtgagacttatcgggtatagcagtgcctggaagtggtccttccagcactggggccagggcaccctggtcaccgtgtcctcagcctccaccaagggcccatcggtcttccccctggcaccctcctccaagagcacctctgggggcacagcggccctgggctgcctggtcaaggactacttccccgaaccggtgacggtgtcgtggaactcaggcgccctgaccagcggcgtgcacaccttcccggctgtcctacagtcctcaggactctactccctcagcagcgtggtgaccgtgccctccagcagcttgggcacccagacctacatctgcaacgtgaatcacaagcccagcaacaccaaggtggacaagaaagttgagcccaaatcttgtgacaaaactcacacatgcccaccgtgcccagcacctgaactcctggggggaccgtcagtcttcctcttccccccaaaacccaaggacaccctcatgatctcccggacccctgaggtcacatgcgtggtggtggacgtgagccacgaagaccctgaggtcaagttcaactggtacgtggacggcgtggaggtgcataatgccaagacaaagccgtgcgaggagcagtacggcagcacgtaccgttgcgtcagcgtcctcaccgtcctgcaccaggactggctgaatggcaaggagtacaagtgcaaggtgtccaacaaagccctcccagcccccatcgagaaaaccatctccaaagccaaagggcagccccgagaaccacaggtgtacaccctgcccccatcccggaaggagatgaccaagaaccaggtcagcctgacctgcctggtcaaaggcttctatcccagcgacatcgccgtggagtgggagagcaatgggcagccggagaacaactacaagaccacgcctcccgtgctgaagtccgacggctccttcttcctctatagcaagctcaccgtggacaagagcaggtggcagcaggggaacgtcttctcatgctccgtgatgcatgaggctctgcacaaccactacacgcagaagagcctctccctgtctcccgggggaggcggtggatcctctccaggtcaaggtactcaatccgaaaactcctgcacccacttcccgggtaacctgccgaacatgctgcgtgacctgcgtgacgctttctcccgtgttaaaaccttcttcgagatgaaagaccagctggacaacctgctgctgaaagaatccctgctggaagacttcaaaggttacctgggttgtcaggctctgtccgaaatgatccagttctacctggaagaagttatgccgcaggctgaaaaccaggacccggacatcaaagctcacgttaactccctgggtgaaaacctgaaaaccctgcgtctgcgtctgcgccgttgccatcgattcctgccgtgcgaaaacggtggcggttctggtggtaaatccaaagctgttgaacaggttaaaaacgctttcaacaaactgcaggaaaaaggtatctacaaagctatgtccgaattcgacatcttcatcaactacatcgaagcttacatgaccatgaaaatccgtaactag

SEQ ID NO: 693 - DNA, 711 bp, synthetic construct; identical to SEQ ID NO: 400
  misc_feature 1..711: note = Synthetic
  source 1..711: mol_type = other DNA

SEQ ID NO: 694 - DNA, 1260 bp, synthetic construct; identical to SEQ ID NO: 535
  misc_feature 1..1260: note = Synthetic
  source 1..1260: mol_type = other DNA

SEQ ID NO: 695 - DNA, 1935 bp, synthetic construct
  misc_feature 1..1935: note = Synthetic
  source 1..1935: mol_type = other DNA
atggacatgagggtgcccgctcagctcctggggctcctgctgctgtggctgagaggtgcgcgctgtcaggtgcagctggtgcagtctggggctgaggtgaagaagcctggggcctcagtgaaggtgtcctgcaaggcttctggatacaccttcaccagttatgatatcaactgggtgcgacaggccactggacaagggcttgagtggatgggaaggatgaaccctaagagtggtaatgcaggctatgtacagaacttccggggcagagtcaccatgaccagggacacctccatcagcacagcctacatggagctgagcagcctgagatctgaggacacggccgtgtattactgtgcgagaggcgggcgtaccagcatctggtccttcgtctttgattactggggccagggcaccctggtcaccgtgtcctcagcctccaccaagggcccatcggtcttccccctggcaccctcctccaagagcacctctgggggcacagcggccctgggctgcctggtcaaggactacttccccgaaccggtgacggtgtcgtggaactcaggcgccctgaccagcggcgtgcacaccttcccggctgtcctacagtcctcaggactctactccctcagcagcgtggtgaccgtgccctccagcagcttgggcacccagacctacatctgcaacgtgaatcacaagcccagcaacaccaaggtggacaagaaagttgagcccaaatcttgtgacaaaactcacacatgcccaccgtgcccagcacctgaactcctggggggaccgtcagtcttcctcttccccccaaaacccaaggacaccctcatgatctcccggacccctgaggtcacatgcgtggtggtggacgtgagccacgaagaccctgaggtcaagttcaactggtacgtggacggcgtggaggtgcataatgccaagacaaagccgtgcgaggagcagtacggcagcacgtaccgttgcgtcagcgtcctcaccgtcctgcaccaggactggctgaatggcaaggagtacaagtgcaaggtgtccaacaaagccctcccagcccccatcgagaaaaccatctccaaagccaaagggcagccccgagaaccacaggtgtacaccctgcccccatcccggaaggagatgaccaagaaccaggtcagcctgacctgcctggtcaaaggcttctatcccagcgacatcgccgtggagtgggagagcaatgggcagccggagaacaactacaagaccacgcctcccgtgctgaagtccgacggctccttcttcctctatagcaagctcaccgtggacaagagcaggtggcagcaggggaacgtcttctcatgctccgtgatgcatgaggctctgcacaaccactacacgcagaagagcctctccctgtctcccgggggaggcggtggatcctctccaggtcaaggtactcaatccgaaaactcctgcacccacttcccgggtaacctgccgaacatgctgcgtgacctgcttgacgctttctcccgtgttaaaaccttcttccagatgaaagaccagctggacaacctgctgctgaaagaatccctgctggaagacttcaaaggttacctgggttgtcaggctctgtccgaaatgatccagttctacctggaagaagttatgccgcaggctgaaaaccaggacccggacatcaaagctcacgttaactccctgggtgaaaacctgaaaaccctgcgtctgcgtctgcgccgttgccatcgattcctgccgtgcgaaaacggtggcggttctggtggtaaatccaaagctgttgaacaggttaaaaacgctttcaacaaactgcaggaaaaaggtatctacaaagctatgtccgaattcgacatcttcatcaactacatcgaagcttacatgaccatgaaaatccgtaactag

SEQ ID NO: 696 - DNA, 711 bp, synthetic construct; identical to SEQ ID NO: 416
  misc_feature 1..711: note = Synthetic
  source 1..711: mol_type = other DNA

SEQ ID NO: 697 - DNA, 1260 bp, synthetic construct; identical to SEQ ID NO: 529
  misc_feature 1..1260: note = Synthetic
  source 1..1260: mol_type = other DNA

SEQ ID NO: 698 - DNA, 1935 bp, synthetic construct
  misc_feature 1..1935: note = Synthetic
  source 1..1935: mol_type = other DNA
atggacatgagggtgcccgctcagctcctggggctcctgctgctgtggctgagaggtgcgcgctgtcaggtgcagctggtgcagtctggggctgaggtgaagaagcctggggcctcagtgaaggtgtcctgcaaggcttctggatacaccttcaccagttatgatatcaactgggtgcgacaggccactggacaagggcttgagtggatgggaaggatgaaccctaagagtggtaatgcaggctatgtacagaacttccggggcagagtcaccatgaccagggacacctccatcagcacagcctacatggagctgagcagcctgagatctgaggacacggccgtgtattactgtgcgagaggcgggcgtaccagcatctggtccttcgtctttgattactggggccagggcaccctggtcaccgtgtcctcagcctccaccaagggcccatcggtcttccccctggcaccctcctccaagagcacctctgggggcacagcggccctgggctgcctggtcaaggactacttccccgaaccggtgacggtgtcgtggaactcaggcgccctgaccagcggcgtgcacaccttcccggctgtcctacagtcctcaggactctactccctcagcagcgtggtgaccgtgccctccagcagcttgggcacccagacctacatctgcaacgtgaatcacaagcccagcaacaccaaggtggacaagaaagttgagcccaaatcttgtgacaaaactcacacatgcccaccgtgcccagcacctgaactcctggggggaccgtcagtcttcctcttccccccaaaacccaaggacaccctcatgatctcccggacccctgaggtcacatgcgtggtggtggacgtgagccacgaagaccctgaggtcaagttcaactggtacgtggacggcgtggaggtgcataatgccaagacaaagccgtgcgaggagcagtacggcagcacgtaccgttgcgtcagcgtcctcaccgtcctgcaccaggactggctgaatggcaaggagtacaagtgcaaggtgtccaacaaagccctcccagcccccatcgagaaaaccatctccaaagccaaagggcagccccgagaaccacaggtgtacaccctgcccccatcccggaaggagatgaccaagaaccaggtcagcctgacctgcctggtcaaaggcttctatcccagcgacatcgccgtggagtgggagagcaatgggcagccggagaacaactacaagaccacgcctcccgtgctgaagtccgacggctccttcttcctctatagcaagctcaccgtggacaagagcaggtggcagcaggggaacgtcttctcatgctccgtgatgcatgaggctctgcacaaccactacacgcagaagagcctctccctgtctcccgggggaggcggtggatcctctccaggtcaaggtactcaatccgaaaactcctgcacccacttcccgggtaacctgccgaacatgctgcgtgacctgcgtgacgctttctcccgtgttaaaaccttcttccagatgaaagaccagctggacaacctgctgctgaaagaatccctgctggaagacttcaaaggttacctgggttgtcaggctctgtccgaaatgatccagttctacctggaagaagttatgccgcaggctgaaaaccaggacccggacatcaaagctcacgttaactccctgggtgaaaacctgaaaaccctgcgtctgcgtctgcgccgttgccatcgattcctgccgtgcgaaaacggtggcggttctggtggtaaatccaaagctgttgaacaggttaaaaacgctttcaacaaactgcaggaaaaaggtatctacttagctatgtccgaattcgacatcttcatcaactacatcgaagcttacatgaccatgaaaatccgtaactag

SEQ ID NO: 699 - DNA, 711 bp, synthetic construct; identical to SEQ ID NO: 416
  misc_feature 1..711: note = Synthetic
  source 1..711: mol_type = other DNA

SEQ ID NO: 700 - DNA, 1260 bp, synthetic construct; identical to SEQ ID NO: 532
  misc_feature 1..1260: note = Synthetic
  source 1..1260: mol_type = other DNA

SEQ ID NO: 701 - DNA, 1935 bp, synthetic construct
  misc_feature 1..1935: note = Synthetic
  source 1..1935: mol_type = other DNA
atggacatgagggtgcccgctcagctcctggggctcctgctgctgtggctgagaggtgcgcgctgtcaggtgcagctggtgcagtctggggctgaggtgaagaagcctggggcctcagtgaaggtgtcctgcaaggcttctggatacaccttcaccagttatgatatcaactgggtgcgacaggccactggacaagggcttgagtggatgggaaggatgaaccctaagagtggtaatgcaggctatgtacagaacttccggggcagagtcaccatgaccagggacacctccatcagcacagcctacatggagctgagcagcctgagatctgaggacacggccgtgtattactgtgcgagaggcgggcgtaccagcatctggtccttcgtctttgattactggggccagggcaccctggtcaccgtgtcctcagcctccaccaagggcccatcggtcttccccctggcaccctcctccaagagcacctctgggggcacagcggccctgggctgcctggtcaaggactacttccccgaaccggtgacggtgtcgtggaactcaggcgccctgaccagcggcgtgcacaccttcccggctgtcctacagtcctcaggactctactccctcagcagcgtggtgaccgtgccctccagcagcttgggcacccagacctacatctgcaacgtgaatcacaagcccagcaacaccaaggtggacaagaaagttgagcccaaatcttgtgacaaaactcacacatgcccaccgtgcccagcacctgaactcctggggggaccgtcagtcttcctcttccccccaaaacccaaggacaccctcatgatctcccggacccctgaggtcacatgcgtggtggtggacgtgagccacgaagaccctgaggtcaagttcaactggtacgtggacggcgtggaggtgcataatgccaagacaaagccgtgcgaggagcagtacggcagcacgtaccgttgcgtcagcgtcctcaccgtcctgcaccaggactggctgaatggcaaggagtacaagtgcaaggtgtccaacaaagccctcccagcccccatcgagaaaaccatctccaaagccaaagggcagccccgagaaccacaggtgtacaccctgcccccatcccggaaggagatgaccaagaaccaggtcagcctgacctgcctggtcaaaggcttctatcccagcgacatcgccgtggagtgggagagcaatgggcagccggagaacaactacaagaccacgcctcccgtgctgaagtccgacggctccttcttcctctatagcaagctcaccgtggacaagagcaggtggcagcaggggaacgtcttctcatgctccgtgatgcatgaggctctgcacaaccactacacgcagaagagcctctccctgtctcccgggggaggcggtggatcctctccaggtcaaggtactcaatccgaaaactcctgcacccacttcccgggtaacctgccgaacatgctgcgtgacctgcgtgacgctttctcccgtgttaaaaccttcttccagatgaaagaccagctggacaacctgctgctgaaagaatccctgctggaagacttcaaaggttacctgggttgtcaggctctgtccgaaatgatccagttctacctggaagaagttatgccgcaggctgaaaaccaggacccggacatcaaagctcacgttaactccctgggtgaaaacctgaaaaccctgcgtctgcgtctgcgccgttgccatcgattcctgccgtgcgaaaacggtggcggttctggtggtaaatccaaagctgttgaacaggttaaaaacgctttcaacaaactgcaggaaaaaggtatctacgacgctatgtccgaattcgacatcttcatcaactacatcgaagcttacatgaccatgaaaatccgtaactag

SEQ ID NO: 702 - DNA, 711 bp, synthetic construct; identical to SEQ ID NO: 416
  misc_feature 1..711: note = Synthetic
  source 1..711: mol_type = other DNA

SEQ ID NO: 703 - DNA, 1260 bp, synthetic construct; identical to SEQ ID NO: 535
  misc_feature 1..1260: note = Synthetic
  source 1..1260: mol_type = other DNA

SEQ ID NO: 704 - DNA, 1935 bp, synthetic construct
  misc_feature 1..1935: note = Synthetic
  source 1..1935: mol_type = other DNA
atggacatgagggtgcccgctcagctcctggggctcctgctgctgtggctgagaggtgcgcgctgtcaggtgcagctggtgcagtctggggctgaggtgaagaagcctggggcctcagtgaaggtgtcctgcaaggcttctggatacaccttcaccagttatgatatcaactgggtgcgacaggccactggacaagggcttgagtggatgggaaggatgaaccctaagagtggtaatgcaggctatgtacagaacttccggggcagagtcaccatgaccagggacacctccatcagcacagcctacatggagctgagcagcctgagatctgaggacacggccgtgtattactgtgcgagaggcgggcgtaccagcatctggtccttcgtctttgattactggggccagggcaccctggtcaccgtgtcctcagcctccaccaagggcccatcggtcttccccctggcaccctcctccaagagcacctctgggggcacagcggccctgggctgcctggtcaaggactacttccccgaaccggtgacggtgtcgtggaactcaggcgccctgaccagcggcgtgcacaccttcccggctgtcctacagtcctcaggactctactccctcagcagcgtggtgaccgtgccctccagcagcttgggcacccagacctacatctgcaacgtgaatcacaagcccagcaacaccaaggtggacaagaaagttgagcccaaatcttgtgacaaaactcacacatgcccaccgtgcccagcacctgaactcctggggggaccgtcagtcttcctcttccccccaaaacccaaggacaccctcatgatctcccggacccctgaggtcacatgcgtggtggtggacgtgagccacgaagaccctgaggtcaagttcaactggtacgtggacggcgtggaggtgcataatgccaagacaaagccgtgcgaggagcagtacggcagcacgtaccgttgcgtcagcgtcctcaccgtcctgcaccaggactggctgaatggcaaggagtacaagtgcaaggtgtccaacaaagccctcccagcccccatcgagaaaaccatctccaaagccaaagggcagccccgagaaccacaggtgtacaccctgcccccatcccggaaggagatgaccaagaaccaggtcagcctgacctgcctggtcaaaggcttctatcccagcgacatcgccgtggagtgggagagcaatgggcagccggagaacaactacaagaccacgcctcccgtgctgaagtccgacggctccttcttcctctatagcaagctcaccgtggacaagagcaggtggcagcaggggaacgtcttctcatgctccgtgatgcatgaggctctgcacaaccactacacgcagaagagcctctccctgtctcccgggggaggcggtggatcctctccaggtcaaggtactcaatccgaaaactcctgcacccacttcccgggtaacctgccgaacatgctgcgtgacctgcgtgacgctttctcccgtgttaaaaccttcttccagatgaaaggccagctggacaacctgctgctgaaagaatccctgctggaagacttcaaaggttacctgggttgtcaggctctgtccgaaatgatccagttctacctggaagaagttatgccgcaggctgaaaaccaggacccggacatcaaagctcacgttaactccctgggtgaaaacctgaaaaccctgcgtctgcgtctgcgccgttgccatcgattcctgccgtgcgaaaacggtggcggttctggtggtaaatccaaagctgttgaacaggttaaaaacgctttcaacaaactgcaggaaaaaggtatctacaaagctatgtccgaattcgacatcttcatcaactacatcgaagcttacatgaccatgaaaatccgtaactag

SEQ ID NO: 705 - DNA, 711 bp, synthetic construct; identical to SEQ ID NO: 416
  misc_feature 1..711: note = Synthetic
  source 1..711: mol_type = other DNA

SEQ ID NO: 706 - DNA, 1260 bp, synthetic construct; identical to SEQ ID NO: 538
  misc_feature 1..1260: note = Synthetic
  source 1..1260: mol_type = other DNA

SEQ ID NO: 707 - DNA, 1935 bp, synthetic construct
  misc_feature 1..1935: note = Synthetic
  source 1..1935: mol_type = other DNA
atggacatgagggtgcccgctcagctcctggggctcctgctgctgtggctgagaggtgcgcgctgtcaggtgcagctggtgcagtctggggctgaggtgaagaagcctggggcctcagtgaaggtgtcctgcaaggcttctggatacaccttcaccagttatgatatcaactgggtgcgacaggccactggacaagggcttgagtggatgggaaggatgaaccctaagagtggtaatgcaggctatgtacagaacttccggggcagagtcaccatgaccagggacacctccatcagcacagcctacatggagctgagcagcctgagatctgaggacacggccgtgtattactgtgcgagaggcgggcgtaccagcatctggtccttcgtctttgattactggggccagggcaccctggtcaccgtgtcctcagcctccaccaagggcccatcggtcttccccctggcaccctcctccaagagcacctctgggggcacagcggccctgggctgcctggtcaaggactacttccccgaaccggtgacggtgtcgtggaactcaggcgccctgaccagcggcgtgcacaccttcccggctgtcctacagtcctcaggactctactccctcagcagcgtggtgaccgtgccctccagcagcttgggcacccagacctacatctgcaacgtgaatcacaagcccagcaacaccaaggtggacaagaaagttgagcccaaatcttgtgacaaaactcacacatgcccaccgtgcccagcacctgaactcctggggggaccgtcagtcttcctcttccccccaaaacccaaggacaccctcatgatctcccggacccctgaggtcacatgcgtggtggtggacgtgagccacgaagaccctgaggtcaagttcaactggtacgtggacggcgtggaggtgcataatgccaagacaaagccgtgcgaggagcagtacggcagcacgtaccgttgcgtcagcgtcctcaccgtcctgcaccaggactggctgaatggcaaggagtacaagtgcaaggtgtccaacaaagccctcccagcccccatcgagaaaaccatctccaaagccaaagggcagccccgagaaccacaggtgtacaccctgcccccatcccggaaggagatgaccaagaaccaggtcagcctgacctgcctggtcaaaggcttctatcccagcgacatcgccgtggagtgggagagcaatgggcagccggagaacaactacaagaccacgcctcccgtgctgaagtccgacggctccttcttcctctatagcaagctcaccgtggacaagagcaggtggcagcaggggaacgtcttctcatgctccgtgatgcatgaggctctgcacaaccactacacgcagaagagcctctccctgtctcccgggggaggcggtggatcctctccaggtcaaggtactcaatccgaaaactcctgcacccacttcccgggtaacctgccgaacatgctgcgtgacctgcgtgacgctttctcccgtgttaaaaccttcttccggatgaaagaccagctggacaacctgctgctgaaagaatccctgctggaagacttcaaaggttacctgggttgtcaggctctgtccgaaatgatccagttctacctggaagaagttatgccgcaggctgaaaaccaggacccggacatcaaagctcacgttaactccctgggtgaaaacctgaaaaccctgcgtctgcgtctgcgccgttgccatcgattcctgccgtgcgaaaacggtggcggttctggtggtaaatccaaagctgttgaacaggttaaaaacgctttcaacaaactgcaggaaaaaggtatctacaaagctatgtccgaattcgacatcttcatcaactacatcgaagcttacatgaccatgaaaatccgtaactag

SEQ ID NO: 708 - DNA, 711 bp, synthetic construct; identical to SEQ ID NO: 416
  misc_feature 1..711: note = Synthetic
  source 1..711: mol_type = other DNA

SEQ ID NO: 709 - DNA, 1260 bp, synthetic construct; identical to SEQ ID NO: 541
  misc_feature 1..1260: note = Synthetic
  source 1..1260: mol_type = other DNA

SEQ ID NO: 710 - DNA, 1935 bp, synthetic construct
  misc_feature 1..1935: note = Synthetic
  source 1..1935: mol_type = other DNA
atggacatgagggtgcccgctcagctcctggggctcctgctgctgtggctgagaggtgcgcgctgtcaggtgcagctggtgcagtctggggctgaggtgaagaagcctggggcctcagtgaaggtgtcctgcaaggcttctggatacaccttcaccagttatgatatcaactgggtgcgacaggccactggacaagggcttgagtggatgggaaggatgaaccctaagagtggtaatgcaggctatgtacagaacttccggggcagagtcaccatgaccagggacacctccatcagcacagcctacatggagctgagcagcctgagatctgaggacacggccgtgtattactgtgcgagaggcgggcgtaccagcatctggtccttcgtctttgattactggggccagggcaccctggtcaccgtgtcctcagcctccaccaagggcccatcggtcttccccctggcaccctcctccaagagcacctctgggggcacagcggccctgggctgcctggtcaaggactacttccccgaaccggtgacggtgtcgtggaactcaggcgccctgaccagcggcgtgcacaccttcccggctgtcctacagtcctcaggactctactccctcagcagcgtggtgaccgtgccctccagcagcttgggcacccagacctacatctgcaacgtgaatcacaagcccagcaacaccaaggtggacaagaaagttgagcccaaatcttgtgacaaaactcacacatgcccaccgtgcccagcacctgaactcctggggggaccgtcagtcttcctcttccccccaaaacccaaggacaccctcatgatctcccggacccctgaggtcacatgcgtggtggtggacgtgagccacgaagaccctgaggtcaagttcaactggtacgtggacggcgtggaggtgcataatgccaagacaaagccgtgcgaggagcagtacggcagcacgtaccgttgcgtcagcgtcctcaccgtcctgcaccaggactggctgaatggcaaggagtacaagtgcaaggtgtccaacaaagccctcccagcccccatcgagaaaaccatctccaaagccaaagggcagccccgagaaccacaggtgtacaccctgcccccatcccggaaggagatgaccaagaaccaggtcagcctgacctgcctggtcaaaggcttctatcccagcgacatcgccgtggagtgggagagcaatgggcagccggagaacaactacaagaccacgcctcccgtgctgaagtccgacggctccttcttcctctatagcaagctcaccgtggacaagagcaggtggcagcaggggaacgtcttctcatgctccgtgatgcatgaggctctgcacaaccactacacgcagaagagcctctccctgtctcccgggggaggcggtggatcctctccaggtcaaggtactcaatccgaaaactcctgcacccacttcccgggtaacctgccgaacatgctgcgtgacctgcgtgacgctttctcccgtgttaaaaccttcttccagatgaaagaccagctggacaacaagctgctgaaagaatccctgctggaagacttcaaaggttacctgggttgtcaggctctgtccgaaatgatccagttctacctggaagaagttatgccgcaggctgaaaaccaggacccggacatcaaagctcacgttaactccctgggtgaaaacctgaaaaccctgcgtctgcgtctgcgccgttgccatcgattcctgccgtgcgaaaacggtggcggttctggtggtaaatccaaagctgttgaacaggttaaaaacgctttcaacaaactgcaggaaaaaggtatctacaaagctatgtccgaattcgacatcttcatcaactacatcgaagcttacatgaccatgaaaatccgtaactag

SEQ ID NO: 711 - DNA, 711 bp, synthetic construct; identical to SEQ ID NO: 416
  misc_feature 1..711: note = Synthetic
  source 1..711: mol_type = other DNA

SEQ ID NO: 712 - DNA, 1260 bp, synthetic construct; identical to SEQ ID NO: 544
  misc_feature 1..1260: note = Synthetic
  source 1..1260: mol_type = other DNA

SEQ ID NO: 713 - DNA, 1935 bp, synthetic construct
  misc_feature 1..1935: note = Synthetic
  source 1..1935: mol_type = other DNA
atggacatgagggtgcccgctcagctcctggggctcctgctgctgtggctgagaggtgcgcgctgtcaggtgcagctggtgcagtctggggctgaggtgaagaagcctggggcctcagtgaaggtgtcctgcaaggcttctggatacaccttcaccagttatgatatcaactgggtgcgacaggccactggacaagggcttgagtggatgggaaggatgaaccctaagagtggtaatgcaggctatgtacagaacttccggggcagagtcaccatgaccagggacacctccatcagcacagcctacatggagctgagcagcctgagatctgaggacacggccgtgtattactgtgcgagaggcgggcgtaccagcatctggtccttcgtctttgattactggggccagggcaccctggtcaccgtgtcctcagcctccaccaagggcccatcggtcttccccctggcaccctcctccaagagcacctctgggggcacagcggccctgggctgcctggtcaaggactacttccccgaaccggtgacggtgtcgtggaactcaggcgccctgaccagcggcgtgcacaccttcccggctgtcctacagtcctcaggactctactccctcagcagcgtggtgaccgtgccctccagcagcttgggcacccagacctacatctgcaacgtgaatcacaagcccagcaacaccaaggtggacaagaaagttgagcccaaatcttgtgacaaaactcacacatgcccaccgtgcccagcacctgaactcctggggggaccgtcagtcttcctcttccccccaaaacccaaggacaccctcatgatctcccggacccctgaggtcacatgcgtggtggtggacgtgagccacgaagaccctgaggtcaagttcaactggtacgtggacggcgtggaggtgcataatgccaagacaaagccgtgcgaggagcagtacggcagcacgtaccgttgcgtcagcgtcctcaccgtcctgcaccaggactggctgaatggcaaggagtacaagtgcaaggtgtccaacaaagccctcccagcccccatcgagaaaaccatctccaaagccaaagggcagccccgagaaccacaggtgtacaccctgcccccatcccggaaggagatgaccaagaaccaggtcagcctgacctgcctggtcaaaggcttctatcccagcgacatcgccgtggagtgggagagcaatgggcagccggagaacaactacaagaccacgcctcccgtgctgaagtccgacggctccttcttcctctatagcaagctcaccgtggacaagagcaggtggcagcaggggaacgtcttctcatgctccgtgatgcatgaggctctgcacaaccactacacgcagaagagcctctccctgtctcccgggggaggcggtggatcctctccaggtcaaggtactcaatccgaaaactcctgcacccacttcccgggtaacctgccgaacatgctgcgtgacctgcgtgacgctttctcccgtgttgacaccttcttccagatgaaagaccagctggacaacctgctgctgaaagaatccctgctggaagacttcaaaggttacctgggttgtcaggctctgtccgaaatgatccagttctacctggaagaagttatgccgcaggctgaaaaccaggacccggacatcaaagctcacgttaactccctgggtgaaaacctgaaaaccctgcgtctgcgtctgcgccgttgccatcgattcctgccgtgcgaaaacggtggcggttctggtggtaaatccaaagctgttgaacaggttaaaaacgctttcaacaaactgcaggaaaaaggtatctacaaagctatgtccgaattcgacatcttcatcaactacatcgaagcttacatgaccatgaaaatccgtaactag

SEQ ID NO: 714 - DNA, 711 bp, synthetic construct; identical to SEQ ID NO: 416
  misc_feature 1..711: note = Synthetic
  source 1..711: mol_type = other DNA

SEQ ID NO: 715 - DNA, 1260 bp, synthetic construct; identical to SEQ ID NO: 547
  misc_feature 1..1260: note = Synthetic
  source 1..1260: mol_type = other DNA

SEQ ID NO: 716 - DNA, 1935 bp, synthetic construct
  misc_feature 1..1935: note = Synthetic
  source 1..1935: mol_type = other DNA
atggacatgagggtgcccgctcagctcctggggctcctgctgctgtggctgagaggtgcgcgctgtcaggtgcagctggtgcagtctggggctgaggtgaagaagcctggggcctcagtgaaggtgtcctgcaaggcttctggatacaccttcaccagttatgatatcaactgggtgcgacaggccactggacaagggcttgagtggatgggaaggatgaaccctaagagtggtaatgcaggctatgtacagaacttccggggcagagtcaccatgaccagggacacctccatcagcacagcctacatggagctgagcagcctgagatctgaggacacggccgtgtattactgtgcgagaggcgggcgtaccagcatctggtccttcgtctttgattactggggccagggcaccctggtcaccgtgtcctcagcctccaccaagggcccatcggtcttccccctggcaccctcctccaagagcacctctgggggcacagcggccctgggctgcctggtcaaggactacttccccgaaccggtgacggtgtcgtggaactcaggcgccctgaccagcggcgtgcacaccttcccggctgtcctacagtcctcaggactctactccctcagcagcgtggtgaccgtgccctccagcagcttgggcacccagacctacatctgcaacgtgaatcacaagcccagcaacaccaaggtggacaagaaagttgagcccaaatcttgtgacaaaactcacacatgcccaccgtgcccagcacctgaactcctggggggaccgtcagtcttcctcttccccccaaaacccaaggacaccctcatgatctcccggacccctgaggtcacatgcgtggtggtggacgtgagccacgaagaccctgaggtcaagttcaactggtacgtggacggcgtggaggtgcataatgccaagacaaagccgtgcgaggagcagtacggcagcacgtaccgttgcgtcagcgtcctcaccgtcctgcaccaggactggctgaatggcaaggagtacaagtgcaaggtgtccaacaaagccctcccagcccccatcgagaaaaccatctccaaagccaaagggcagccccgagaaccacaggtgtacaccctgcccccatcccggaaggagatgaccaagaaccaggtcagcctgacctgcctggtcaaaggcttctatcccagcgacatcgccgtggagtgggagagcaatgggcagccggagaacaactacaagaccacgcctcccgtgctgaagtccgacggctccttcttcctctatagcaagctcaccgtggacaagagcaggtggcagcaggggaacgtcttctcatgctccgtgatgcatgaggctctgcacaaccactacacgcagaagagcctctccctgtctcccgggggaggcggtggatcctctccaggtcaaggtactcaatccgaaaactcctgcacccacttcccgggtaacctgccgaacatgctgcgtgacctgcgtgacgctttctcccgtgttaaaaccttcttcgagatgaaagaccagctggacaacctgctgctgaaagaatccctgctggaagacttcaaaggttacctgggttgtcaggctctgtccgaaatgatccagttctacctggaagaagttatgccgcaggctgaaaaccaggacccggacatcaaagctcacgttaactccctgggtgaaaacctgaaaaccctgcgtctgcgtctgcgccgttgccatcgattcctgccgtgcgaaaacggtggcggttctggtggtaaatccaaagctgttgaacaggttaaaaacgctttcaacaaactgcaggaaaaaggtatctacaaagctatgtccgaattcgacatcttcatcaactacatcgaagcttacatgaccatgaaaatccgtaactag

SEQ ID NO: 717 - DNA, 711 bp, synthetic construct; identical to SEQ ID NO: 416
  misc_feature 1..711: note = Synthetic
  source 1..711: mol_type = other DNA

SEQ ID NO: 718 - DNA, 1260 bp, synthetic construct; identical to SEQ ID NO: 550
  misc_feature 1..1260: note = Synthetic
  source 1..1260: mol_type = other DNA

SEQ ID NO: 719 - DNA, 1941 bp, synthetic construct
  misc_feature 1..1941: note = Synthetic
  source 1..1941: mol_type = other DNA
atggacatgagggtgcccgctcagctcctggggctcctgctgctgtggctgagaggtgcgcgctgtcaggtgcagctggtgcagtctggggctgaggtgaagaagcctggggcctcagtgaaggtgtcctgcaaggcttctggatacaccttcaccagttatgatatcaactgggtgcgacaggccactggacaagggcttgagtggatgggatggatgaaccctaacaggggtaacacaggctatgtaaagaagttccagggcagagtcaccatgaccagggacacctccatcagcacagcctacatggagctgagtagtctgagatctgaggacacggccgtgtattactgtgcgagaaggagggccgtgtatcgcagcagctgggagtggtacttcgatctctggggccgtggcaccctggtcactgtctcctcagcctccaccaagggcccatcggtcttccccctggcaccctcctccaagagcacctctgggggcacagcggccctgggctgcctggtcaaggactacttccccgaaccggtgacggtgtcgtggaactcaggcgccctgaccagcggcgtgcacaccttcccggctgtcctacagtcctcaggactctactccctcagcagcgtggtgaccgtgccctccagcagcttgggcacccagacctacatctgcaacgtgaatcacaagcccagcaacaccaaggtggacaagaaagttgagcccaaatcttgtgacaaaactcacacatgcccaccgtgcccagcacctgaactcctggggggaccgtcagtcttcctcttccccccaaaacccaaggacaccctcatgatctcccggacccctgaggtcacatgcgtggtggtggacgtgagccacgaagaccctgaggtcaagttcaactggtacgtggacggcgtggaggtgcataatgccaagacaaagccgtgcgaggagcagtacggcagcacgtaccgttgcgtcagcgtcctcaccgtcctgcaccaggactggctgaatggcaaggagtacaagtgcaaggtgtccaacaaagccctcccagcccccatcgagaaaaccatctccaaagccaaagggcagccccgagaaccacaggtgtacaccctgcccccatcccggaaggagatgaccaagaaccaggtcagcctgacctgcctggtcaaaggcttctatcccagcgacatcgccgtggagtgggagagcaatgggcagccggagaacaactacaagaccacgcctcccgtgctgaagtccgacggctccttcttcctctatagcaagctcaccgtggacaagagcaggtggcagcaggggaacgtcttctcatgctccgtgatgcatgaggctctgcacaaccactacacgcagaagagcctctccctgtctcccgggggaggcggtggatcctctccaggtcaaggtactcaatccgaaaactcctgcacccacttcccgggtaacctgccgaacatgctgcgtgacctgcttgacgctttctcccgtgttaaaaccttcttccagatgaaagaccagctggacaacctgctgctgaaagaatccctgctggaagacttcaaaggttacctgggttgtcaggctctgtccgaaatgatccagttctacctggaagaagttatgccgcaggctgaaaaccaggacccggacatcaaagctcacgttaactccctgggtgaaaacctgaaaaccctgcgtctgcgtctgcgccgttgccatcgattcctgccgtgcgaaaacggtggcggttctggtggtaaatccaaagctgttgaacaggttaaaaacgctttcaacaaactgcaggaaaaaggtatctacaaagctatgtccgaattcgacatcttcatcaactacatcgaagcttacatgaccatgaaaatccgtaactag

SEQ ID NO: 720 - DNA, 711 bp, synthetic construct; identical to SEQ ID NO: 432
  misc_feature 1..711: note = Synthetic
  source 1..711: mol_type = other DNA

SEQ ID NO: 721 - DNA, 1260 bp, synthetic construct; identical to SEQ ID NO: 529
  misc_feature 1..1260: note = Synthetic
  source 1..1260: mol_type = other DNA

SEQ ID NO: 722 - DNA, 1941 bp, synthetic construct
  misc_feature 1..1941: note = Synthetic
  source 1..1941: mol_type = other DNA
atggacatgagggtgcccgctcagctcctggggctcctgctgctgtggctgagaggtgcgcgctgtcaggtgcagctggtgcagtctggggctgaggtgaagaagcctggggcctcagtgaaggtgtcctgcaaggcttctggatacaccttcaccagttatgatatcaactgggtgcgacaggccactggacaagggcttgagtggatgggatggatgaaccctaacaggggtaacacaggctatgtaaagaagttccagggcagagtcaccatgaccagggacacctccatcagcacagcctacatggagctgagtagtctgagatctgaggacacggccgtgtattactgtgcgagaaggagggccgtgtatcgcagcagctgggagtggtacttcgatctctggggccgtggcaccctggtcactgtctcctcagcctccaccaagggcccatcggtcttccccctggcaccctcctccaagagcacctctgggggcacagcggccctgggctgcctggtcaaggactacttccccgaaccggtgacggtgtcgtggaactcaggcgccctgaccagcggcgtgcacaccttcccggctgtcctacagtcctcaggactctactccctcagcagcgtggtgaccgtgccctccagcagcttgggcacccagacctacatctgcaacgtgaatcacaagcccagcaacaccaaggtggacaagaaagttgagcccaaatcttgtgacaaaactcacacatgcccaccgtgcccagcacctgaactcctggggggaccgtcagtcttcctcttccccccaaaacccaaggacaccctcatgatctcccggacccctgaggtcacatgcgtggtggtggacgtgagccacgaagaccctgaggtcaagttcaactggtacgtggacggcgtggaggtgcataatgccaagacaaagccgtgcgaggagcagtacggcagcacgtaccgttgcgtcagcgtcctcaccgtcctgcaccaggactggctgaatggcaaggagtacaagtgcaaggtgtccaacaaagccctcccagcccccatcgagaaaaccatctccaaagccaaagggcagccccgagaaccacaggtgtacaccctgcccccatcccggaaggagatgaccaagaaccaggtcagcctgacctgcctggtcaaaggcttctatcccagcgacatcgccgtggagtgggagagcaatgggcagccggagaacaactacaagaccacgcctcccgtgctgaagtccgacggctccttcttcctctatagcaagctcaccgtggacaagagcaggtggcagcaggggaacgtcttctcatgctccgtgatgcatgaggctctgcacaaccactacacgcagaagagcctctccctgtctcccgggggaggcggtggatcctctccaggtcaaggtactcaatccgaaaactcctgcacccacttcccgggtaacctgccgaacatgctgcgtgacctgcgtgacgctttctcccgtgttaaaaccttcttccagatgaaagaccagctggacaacctgctgctgaaagaatccctgctggaagacttcaaaggttacctgggttgtcaggctctgtccgaaatgatccagttctacctggaagaagttatgccgcaggctgaaaaccaggacccggacatcaaagctcacgttaactccctgggtgaaaacctgaaaaccctgcgtctgcgtctgcgccgttgccatcgattcctgccgtgcgaaaacggtggcggttctggtggtaaatccaaagctgttgaacaggttaaaaacgctttcaacaaactgcaggaaaaaggtatctacttagctatgtccgaattcgacatcttcatcaactacatcgaagcttacatgaccatgaaaatccgtaactag

SEQ ID NO: 723 - DNA, 711 bp, synthetic construct; identical to SEQ ID NO: 432
  misc_feature 1..711: note = Synthetic
  source 1..711: mol_type = other DNA

SEQ ID NO: 724 - DNA, 1260 bp, synthetic construct; identical to SEQ ID NO: 532
  misc_feature 1..1260: note = Synthetic
  source 1..1260: mol_type = other DNA

SEQ ID NO: 725 - DNA, 1941 bp, synthetic construct
  misc_feature 1..1941: note = Synthetic
  source 1..1941: mol_type = other DNA
atggacatgagggtgcccgctcagctcctggggctcctgctgctgtggctgagaggtgcgcgctgtcaggtgcagctggtgcagtctggggctgaggtgaagaagcctggggcctcagtgaaggtgtcctgcaaggcttctggatacaccttcaccagttatgatatcaactgggtgcgacaggccactggacaagggcttgagtggatgggatggatgaaccctaacaggggtaacacaggctatgtaaagaagttccagggcagagtcaccatgaccagggacacctccatcagcacagcctacatggagctgagtagtctgagatctgaggacacggccgtgtattactgtgcgagaaggagggccgtgtatcgcagcagctgggagtggtacttcgatctctggggccgtggcaccctggtcactgtctcctcagcctccaccaagggcccatcggtcttccccctggcaccctcctccaagagcacctctgggggcacagcggccctgggctgcctggtcaaggactacttccccgaaccggtgacggtgtcgtggaactcaggcgccctgaccagcggcgtgcacaccttcccggctgtcctacagtcctcaggactctactccctcagcagcgtggtgaccgtgccctccagcagcttgggcacccagacctacatctgcaacgtgaatcacaagcccagcaacaccaaggtggacaagaaagttgagcccaaatcttgtgacaaaactcacacatgcccaccgtgcccagcacctgaactcctggggggaccgtcagtcttcctcttccccccaaaacccaaggacaccctcatgatctcccggacccctgaggtcacatgcgtggtggtggacgtgagccacgaagaccctgaggtcaagttcaactggtacgtggacggcgtggaggtgcataatgccaagacaaagccgtgcgaggagcagtacggcagcacgtaccgttgcgtcagcgtcctcaccgtcctgcaccaggactggctgaatggcaaggagtacaagtgcaaggtgtccaacaaagccctcccagcccccatcgagaaaaccatctccaaagccaaagggcagccccgagaaccacaggtgtacaccctgcccccatcccggaaggagatgaccaagaaccaggtcagcctgacctgcctggtcaaaggcttctatcccagcgacatcgccgtggagtgggagagcaatgggcagccggagaacaactacaagaccacgcctcccgtgctgaagtccgacggctccttcttcctctatagcaagctcaccgtggacaagagcaggtggcagcaggggaacgtcttctcatgctccgtgatgcatgaggctctgcacaaccactacacgcagaagagcctctccctgtctcccgggggaggcggtggatcctctccaggtcaaggtactcaatccgaaaactcctgcacccacttcccgggtaacctgccgaacatgctgcgtgacctgcgtgacgctttctcccgtgttaaaaccttcttccagatgaaagaccagctggacaacctgctgctgaaagaatccctgctggaagacttcaaaggttacctgggttgtcaggctctgtccgaaatgatccagttctacctggaagaagttatgccgcaggctgaaaaccaggacccggacatcaaagctcacgttaactccctgggtgaaaacctgaaaaccctgcgtctgcgtctgcgccgttgccatcgattcctgccgtgcgaaaacggtggcggttctggtggtaaatccaaagctgttgaacaggttaaaaacgctttcaacaaactgcaggaaaaaggtatctacgacgctatgtccgaattcgacatcttcatcaactacatcgaagcttacatgaccatgaaaatccgtaactag

SEQ ID NO: 726 - DNA, 711 bp, synthetic construct; identical to SEQ ID NO: 432
  misc_feature 1..711: note = Synthetic
  source 1..711: mol_type = other DNA

SEQ ID NO: 727 - DNA, 1260 bp, synthetic construct; identical to SEQ ID NO: 535
  misc_feature 1..1260: note = Synthetic
  source 1..1260: mol_type = other DNA

SEQ ID NO: 728 - DNA, 1941 bp, synthetic construct
  misc_feature 1..1941: note = Synthetic
  source 1..1941: mol_type = other DNA
atggacatgagggtgcccgctcagctcctggggctcctgctgctgtggctgagaggtgcgcgctgtcaggtgcagctggtgcagtctggggctgaggtgaagaagcctggggcctcagtgaaggtgtcctgcaaggcttctggatacaccttcaccagttatgatatcaactgggtgcgacaggccactggacaagggcttgagtggatgggatggatgaaccctaacaggggtaacacaggctatgtaaagaagttccagggcagagtcaccatgaccagggacacctccatcagcacagcctacatggagctgagtagtctgagatctgaggacacggccgtgtattactgtgcgagaaggagggccgtgtatcgcagcagctgggagtggtacttcgatctctggggccgtggcaccctggtcactgtctcctcagcctccaccaagggcccatcggtcttccccctggcaccctcctccaagagcacctctgggggcacagcggccctgggctgcctggtcaaggactacttccccgaaccggtgacggtgtcgtggaactcaggcgccctgaccagcggcgtgcacaccttcccggctgtcctacagtcctcaggactctactccctcagcagcgtggtgaccgtgccctccagcagcttgggcacccagacctacatctgcaacgtgaatcacaagcccagcaacaccaaggtggacaagaaagttgagcccaaatcttgtgacaaaactcacacatgcccaccgtgcccagcacctgaactcctggggggaccgtcagtcttcctcttccccccaaaacccaaggacaccctcatgatctcccggacccctgaggtcacatgcgtggtggtggacgtgagccacgaagaccctgaggtcaagttcaactggtacgtggacggcgtggaggtgcataatgccaagacaaagccgtgcgaggagcagtacggcagcacgtaccgttgcgtcagcgtcctcaccgtcctgcaccaggactggctgaatggcaaggagtacaagtgcaaggtgtccaacaaagccctcccagcccccatcgagaaaaccatctccaaagccaaagggcagccccgagaaccacaggtgtacaccctgcccccatcccggaaggagatgaccaagaaccaggtcagcctgacctgcctggtcaaaggcttctatcccagcgacatcgccgtggagtgggagagcaatgggcagccggagaacaactacaagaccacgcctcccgtgctgaagtccgacggctccttcttcctctatagcaagctcaccgtggacaagagcaggtggcagcaggggaacgtcttctcatgctccgtgatgcatgaggctctgcacaaccactacacgcagaagagcctctccctgtctcccgggggaggcggtggatcctctccaggtcaaggtactcaatccgaaaactcctgcacccacttcccgggtaacctgccgaacatgctgcgtgacctgcgtgacgctttctcccgtgttaaaaccttcttccagatgaaaggccagctggacaacctgctgctgaaagaatccctgctggaagacttcaaaggttacctgggttgtcaggctctgtccgaaatgatccagttctacctggaagaagttatgccgcaggctgaaaaccaggacccggacatcaaagctcacgttaactccctgggtgaaaacctgaaaaccctgcgtctgcgtctgcgccgttgccatcgattcctgccgtgcgaaaacggtggcggttctggtggtaaatccaaagctgttgaacaggttaaaaacgctttcaacaaactgcaggaaaaaggtatctacaaagctatgtccgaattcgacatcttcatcaactacatcgaagcttacatgaccatgaaaatccgtaactag

SEQ ID NO: 729 - DNA, 711 bp, synthetic construct; identical to SEQ ID NO: 432
  misc_feature 1..711: note = Synthetic
  source 1..711: mol_type = other DNA

SEQ ID NO: 730 - DNA, 1260 bp, synthetic construct; identical to SEQ ID NO: 538
  misc_feature 1..1260: note = Synthetic
  source 1..1260: mol_type = other DNA

SEQ ID NO: 731 - DNA, 1941 bp, synthetic construct
  misc_feature 1..1941: note = Synthetic
  source 1..1941: mol_type = other DNA
atggacatgagggtgcccgctcagctcctggggctcctgctgctgtggctgagaggtgcgcgctgtcaggtgcagctggtgcagtctggggctgaggtgaagaagcctggggcctcagtgaaggtgtcctgcaaggcttctggatacaccttcaccagttatgatatcaactgggtgcgacaggccactggacaagggcttgagtggatgggatggatgaaccctaacaggggtaacacaggctatgtaaagaagttccagggcagagtcaccatgaccagggacacctccatcagcacagcctacatggagctgagtagtctgagatctgaggacacggccgtgtattactgtgcgagaaggagggccgtgtatcgcagcagctgggagtggtacttcgatctctggggccgtggcaccctggtcactgtctcctcagcctccaccaagggcccatcggtcttccccctggcaccctcctccaagagcacctctgggggcacagcggccctgggctgcctggtcaaggactacttccccgaaccggtgacggtgtcgtggaactcaggcgccctgaccagcggcgtgcacaccttcccggctgtcctacagtcctcaggactctactccctcagcagcgtggtgaccgtgccctccagcagcttgggcacccagacctacatctgcaacgtgaatcacaagcccagcaacaccaaggtggacaagaaagttgagcccaaatcttgtgacaaaactcacacatgcccaccgtgcccagcacctgaactcctggggggaccgtcagtcttcctcttccccccaaaacccaaggacaccctcatgatctcccggacccctgaggtcacatgcgtggtggtggacgtgagccacgaagaccctgaggtcaagttcaactggtacgtggacggcgtggaggtgcataatgccaagacaaagccgtgcgaggagcagtacggcagcacgtaccgttgcgtcagcgtcctcaccgtcctgcaccaggactggctgaatggcaaggagtacaagtgcaaggtgtccaacaaagccctcccagcccccatcgagaaaaccatctccaaagccaaagggcagccccgagaaccacaggtgtacaccctgcccccatcccggaaggagatgaccaagaaccaggtcagcctgacctgcctggtcaaaggcttctatcccagcgacatcgccgtggagtgggagagcaatgggcagccggagaacaactacaagaccacgcctcccgtgctgaagtccgacggctccttcttcctctatagcaagctcaccgtggacaagagcaggtggcagcaggggaacgtcttctcatgctccgtgatgcatgaggctctgcacaaccactacacgcagaagagcctctccctgtctcccgggggaggcggtggatcctctccaggtcaaggtactcaatccgaaaactcctgcacccacttcccgggtaacctgccgaacatgctgcgtgacctgcgtgacgctttctcccgtgttaaaaccttcttccggatgaaagaccagctggacaacctgctgctgaaagaatccctgctggaagacttcaaaggttacctgggttgtcaggctctgtccgaaatgatccagttctacctggaagaagttatgccgcaggctgaaaaccaggacccggacatcaaagctcacgttaactccctgggtgaaaacctgaaaaccctgcgtctgcgtctgcgccgttgccatcgattcctgccgtgcgaaaacggtggcggttctggtggtaaatccaaagctgttgaacaggttaaaaacgctttcaacaaactgcaggaaaaaggtatctacaaagctatgtccgaattcgacatcttcatcaactacatcgaagcttacatgaccatgaaaatccgtaactag

SEQ ID NO: 732 - DNA, 711 bp, synthetic construct; identical to SEQ ID NO: 432
  misc_feature 1..711: note = Synthetic
  source 1..711: mol_type = other DNA

SEQ ID NO: 733 - DNA, 1260 bp, synthetic construct; identical to SEQ ID NO: 541
  misc_feature 1..1260: note = Synthetic
  source 1..1260: mol_type = other DNA

SEQ ID NO: 734 - DNA, 1941 bp, synthetic construct
  misc_feature 1..1941: note = Synthetic
  source 1..1941: mol_type = other DNA
atggacatgagggtgcccgctcagctcctggggctcctgctgctgtggctgagaggtgcgcgctgtcaggtgcagctggtgcagtctggggctgaggtgaagaagcctggggcctcagtgaaggtgtcctgcaaggcttctggatacaccttcaccagttatgatatcaactgggtgcgacaggccactggacaagggcttgagtggatgggatggatgaaccctaacaggggtaacacaggctatgtaaagaagttccagggcagagtcaccatgaccagggacacctccatcagcacagcctacatggagctgagtagtctgagatctgaggacacggccgtgtattactgtgcgagaaggagggccgtgtatcgcagcagctgggagtggtacttcgatctctggggccgtggcaccctggtcactgtctcctcagcctccaccaagggcccatcggtcttccccctggcaccctcctccaagagcacctctgggggcacagcggccctgggctgcctggtcaaggactacttccccgaaccggtgacggtgtcgtggaactcaggcgccctgaccagcggcgtgcacaccttcccggctgtcctacagtcctcaggactctactccctcagcagcgtggtgaccgtgccctccagcagcttgggcacccagacctacatctgcaacgtgaatcacaagcccagcaacaccaaggtggacaagaaagttgagcccaaatcttgtgacaaaactcacacatgcccaccgtgcccagcacctgaactcctggggggaccgtcagtcttcctcttccccccaaaacccaaggacaccctcatgatctcccggacccctgaggtcacatgcgtggtggtggacgtgagccacgaagaccctgaggtcaagttcaactggtacgtggacggcgtggaggtgcataatgccaagacaaagccgtgcgaggagcagtacggcagcacgtaccgttgcgtcagcgtcctcaccgtcctgcaccaggactggctgaatggcaaggagtacaagtgcaaggtgtccaacaaagccctcccagcccccatcgagaaaaccatctccaaagccaaagggcagccccgagaaccacaggtgtacaccctgcccccatcccggaaggagatgaccaagaaccaggtcagcctgacctgcctggtcaaaggcttctatcccagcgacatcgccgtggagtgggagagcaatgggcagccggagaacaactacaagaccacgcctcccgtgctgaagtccgacggctccttcttcctctatagcaagctcaccgtggacaagagcaggtggcagcaggggaacgtcttctcatgctccgtgatgcatgaggctctgcacaaccactacacgcagaagagcctctccctgtctcccgggggaggcggtggatcctctccaggtcaaggtactcaatccgaaaactcctgcacccacttcccgggtaacctgccgaacatgctgcgtgacctgcgtgacgctttctcccgtgttaaaaccttcttccagatgaaagaccagctggacaacaagctgctgaaagaatccctgctggaagacttcaaaggttacctgggttgtcaggctctgtccgaaatgatccagttctacctggaagaagttatgccgcaggctgaaaaccaggacccggacatcaaagctcacgttaactccctgggtgaaaacctgaaaaccctgcgtctgcgtctgcgccgttgccatcgattcctgccgtgcgaaaacggtggcggttctggtggtaaatccaaagctgttgaacaggttaaaaacgctttcaacaaactgcaggaaaaaggtatctacaaagctatgtccgaattcgacatcttcatcaactacatcgaagcttacatgaccatgaaaatccgtaactag

SEQ ID NO: 735 - DNA, 711 bp, synthetic construct; identical to SEQ ID NO: 432
  misc_feature 1..711: note = Synthetic
  source 1..711: mol_type = other DNA

SEQ ID NO: 736 - DNA, 1260 bp, synthetic construct; identical to SEQ ID NO: 544
  misc_feature 1..1260: note = Synthetic
  source 1..1260: mol_type = other DNA

SEQ ID NO: 737 - DNA, 1941 bp, synthetic construct
  misc_feature 1..1941: note = Synthetic
  source 1..1941: mol_type = other DNA
atggacatgagggtgcccgctcagctcctggggctcctgctgctgtggctgagaggtgcgcgctgtcaggtgcagctggtgcagtctggggctgaggtgaagaagcctggggcctcagtgaaggtgtcctgcaaggcttctggatacaccttcaccagttatgatatcaactgggtgcgacaggccactggacaagggcttgagtggatgggatggatgaaccctaacaggggtaacacaggctatgtaaagaagttccagggcagagtcaccatgaccagggacacctccatcagcacagcctacatggagctgagtagtctgagatctgaggacacggccgtgtattactgtgcgagaaggagggccgtgtatcgcagcagctgggagtggtacttcgatctctggggccgtggcaccctggtcactgtctcctcagcctccaccaagggcccatcggtcttccccctggcaccctcctccaagagcacctctgggggcacagcggccctgggctgcctggtcaaggactacttccccgaaccggtgacggtgtcgtggaactcaggcgccctgaccagcggcgtgcacaccttcccggctgtcctacagtcctcaggactctactccctcagcagcgtggtgaccgtgccctccagcagcttgggcacccagacctacatctgcaacgtgaatcacaagcccagcaacaccaaggtggacaagaaagttgagcccaaatcttgtgacaaaactcacacatgcccaccgtgcccagcacctgaactcctggggggaccgtcagtcttcctcttccccccaaaacccaaggacaccctcatgatctcccggacccctgaggtcacatgcgtggtggtggacgtgagccacgaagaccctgaggtcaagttcaactggtacgtggacggcgtggaggtgcataatgccaagacaaagccgtgcgaggagcagtacggcagcacgtaccgttgcgtcagcgtcctcaccgtcctgcaccaggactggctgaatggcaaggagtacaagtgcaaggtgtccaacaaagccctcccagcccccatcgagaaaaccatctccaaagccaaagggcagccccgagaaccacaggtgtacaccctgcccccatcccggaaggagatgaccaagaaccaggtcagcctgacctgcctggtcaaaggcttctatcccagcgacatcgccgtggagtgggagagcaatgggcagccggagaacaactacaagaccacgcctcccgtgctgaagtccgacggctccttcttcctctatagcaagctcaccgtggacaagagcaggtggcagcaggggaacgtcttctcatgctccgtgatgcatgaggctctgcacaaccactacacgcagaagagcctctccctgtctcccgggggaggcggtggatcctctccaggtcaaggtactcaatccgaaaactcctgcacccacttcccgggtaacctgccgaacatgctgcgtgacctgcgtgacgctttctcccgtgttgacaccttcttccagatgaaagaccagctggacaacctgctgctgaaagaatccctgctggaagacttcaaaggttacctgggttgtcaggctctgtccgaaatgatccagttctacctggaagaagttatgccgcaggctgaaaaccaggacccggacatcaaagctcacgttaactccctgggtgaaaacctgaaaaccctgcgtctgcgtctgcgccgttgccatcgattcctgccgtgcgaaaacggtggcggttctggtggtaaatccaaagctgttgaacaggttaaaaacgctttcaacaaactgcaggaaaaaggtatctacaaagctatgtccgaattcgacatcttcatcaactacatcgaagcttacatgaccatgaaaatccgtaactag

SEQ ID NO: 738 - DNA, 711 bp, synthetic construct; identical to SEQ ID NO: 432
  misc_feature 1..711: note = Synthetic
  source 1..711: mol_type = other DNA

SEQ ID NO: 739 - DNA, 1260 bp, synthetic construct; identical to SEQ ID NO: 547
  misc_feature 1..1260: note = Synthetic
  source 1..1260: mol_type = other DNA

SEQ ID NO: 740 - DNA, 1941 bp, synthetic construct
  misc_feature 1..1941: note = Synthetic
  source 1..1941: mol_type = other DNA
atggacatgagggtgcccgctcagctcctggggctcctgctgctgtggctgagaggtgcgcgctgtcaggtgcagctggtgcagtctggggctgaggtgaagaagcctggggcctcagtgaaggtgtcctgcaaggcttctggatacaccttcaccagttatgatatcaactgggtgcgacaggccactggacaagggcttgagtggatgggatggatgaaccctaacaggggtaacacaggctatgtaaagaagttccagggcagagtcaccatgaccagggacacctccatcagcacagcctacatggagctgagtagtctgagatctgaggacacggccgtgtattactgtgcgagaaggagggccgtgtatcgcagcagctgggagtggtacttcgatctctggggccgtggcaccctggtcactgtctcctcagcctccaccaagggcccatcggtcttccccctggcaccctcctccaagagcacctctgggggcacagcggccctgggctgcctggtcaaggactacttccccgaaccggtgacggtgtcgtggaactcaggcgccctgaccagcggcgtgcacaccttcccggctgtcctacagtcctcaggactctactccctcagcagcgtggtgaccgtgccctccagcagcttgggcacccagacctacatctgcaacgtgaatcacaagcccagcaacaccaaggtggacaagaaagttgagcccaaatcttgtgacaaaactcacacatgcccaccgtgcccagcacctgaactcctggggggaccgtcagtcttcctcttccccccaaaacccaaggacaccctcatgatctcccggacccctgaggtcacatgcgtggtggtggacgtgagccacgaagaccctgaggtcaagttcaactggtacgtggacggcgtggaggtgcataatgccaagacaaagccgtgcgaggagcagtacggcagcacgtaccgttgcgtcagcgtcctcaccgtcctgcaccaggactggctgaatggcaaggagtacaagtgcaaggtgtccaacaaagccctcccagcccccatcgagaaaaccatctccaaagccaaagggcagccccgagaaccacaggtgtacaccctgcccccatcccggaaggagatgaccaagaaccaggtcagcctgacctgcctggtcaaaggcttctatcccagcgacatcgccgtggagtgggagagcaatgggcagccggagaacaactacaagaccacgcctcccgtgctgaagtccgacggctccttcttcctctatagcaagctcaccgtggacaagagcaggtggcagcaggggaacgtcttctcatgctccgtgatgcatgaggctctgcacaaccactacacgcagaagagcctctccctgtctcccgggggaggcggtggatcctctccaggtcaaggtactcaatccgaaaactcctgcacccacttcccgggtaacctgccgaacatgctgcgtgacctgcgtgacgctttctcccgtgttaaaaccttcttcgagatgaaagaccagctggacaacctgctgctgaaagaatccctgctggaagacttcaaaggttacctgggttgtcaggctctgtccgaaatgatccagttctacctggaagaagttatgccgcaggctgaaaaccaggacccggacatcaaagctcacgttaactccctgggtgaaaacctgaaaaccctgcgtctgcgtctgcgccgttgccatcgattcctgccgtgcgaaaacggtggcggttctggtggtaaatccaaagctgttgaacaggttaaaaacgctttcaacaaactgcaggaaaaaggtatctacaaagctatgtccgaattcgacatcttcatcaactacatcgaagcttacatgaccatgaaaatccgtaactag

SEQ ID NO: 741 - DNA, 711 bp, synthetic construct; identical to SEQ ID NO: 432
  misc_feature 1..711: note = Synthetic
  source 1..711: mol_type = other DNA

SEQ ID NO: 742 - DNA, 1260 bp, synthetic construct; identical to SEQ ID NO: 550
  misc_feature 1..1260: note = Synthetic
  source 1..1260: mol_type = other DNA

SEQ ID NO: 743 - DNA, 1935 bp, synthetic construct
  misc_feature 1..1935: note = Synthetic
  source 1..1935: mol_type = other DNA
atggacatgagggtgcccgctcagctcctggggctcctgctgctgtggctgagaggtgcgcgctgtcaggtgcagctggtgcagtctggggctgaggtgaagaagcctggggcctcagtgaaggtgtcctgcaaggcttctggatacaccttcaccggctactatatgcactgggtgcgacaggcccctggacaagggcttgagtggatgggatggttcaaacctaatagtggtgtcacaaactatgcacagaagtttcagggcagggtcaccatgagcagggacacgtccatcagcacagcctacatggagctgagcagcctgagatctgacgacacggccgtgtattactgtgcgagagccggatacagcaccagttggaaagactggttcgacccctggggccagggaaccctggtcaccgtgtcttcagcctccaccaagggcccatcggtcttccccctggcaccctcctccaagagcacctctgggggcacagcggccctgggctgcctggtcaaggactacttccccgaaccggtgacggtgtcgtggaactcaggcgccctgaccagcggcgtgcacaccttcccggctgtcctacagtcctcaggactctactccctcagcagcgtggtgaccgtgccctccagcagcttgggcacccagacctacatctgcaacgtgaatcacaagcccagcaacaccaaggtggacaagaaagttgagcccaaatcttgtgacaaaactcacacatgcccaccgtgcccagcacctgaactcctggggggaccgtcagtcttcctcttccccccaaaacccaaggacaccctcatgatctcccggacccctgaggtcacatgcgtggtggtggacgtgagccacgaagaccctgaggtcaagttcaactggtacgtggacggcgtggaggtgcataatgccaagacaaagccgtgcgaggagcagtacggcagcacgtaccgttgcgtcagcgtcctcaccgtcctgcaccaggactggctgaatggcaaggagtacaagtgcaaggtgtccaacaaagccctcccagcccccatcgagaaaaccatctccaaagccaaagggcagccccgagaaccacaggtgtacaccctgcccccatcccggaaggagatgaccaagaaccaggtcagcctgacctgcctggtcaaaggcttctatcccagcgacatcgccgtggagtgggagagcaatgggcagccggagaacaactacaagaccacgcctcccgtgctgaagtccgacggctccttcttcctctatagcaagctcaccgtggacaagagcaggtggcagcaggggaacgtcttctcatgctccgtgatgcatgaggctctgcacaaccactacacgcagaagagcctctccctgtctcccgggggaggcggtggatcctctccaggtcaaggtactcaatccgaaaactcctgcacccacttcccgggtaacctgccgaacatgctgcgtgacctgcttgacgctttctcccgtgttaaaaccttcttccagatgaaagaccagctggacaacctgctgctgaaagaatccctgctggaagacttcaaaggttacctgggttgtcaggctctgtccgaaatgatccagttctacctggaagaagttatgccgcaggctgaaaaccaggacccggacatcaaagctcacgttaactccctgggtgaaaacctgaaaaccctgcgtctgcgtctgcgccgttgccatcgattcctgccgtgcgaaaacggtggcggttctggtggtaaatccaaagctgttgaacaggttaaaaacgctttcaacaaactgcaggaaaaaggtatctacaaagctatgtccgaattcgacatcttcatcaactacatcgaagcttacatgaccatgaaaatccgtaactag

SEQ ID NO: 744 - DNA, 711 bp, synthetic construct; identical to SEQ ID NO: 448
  misc_feature 1..711: note = Synthetic
  source 1..711: mol_type = other DNA

SEQ ID NO: 745 - DNA, 1260 bp, synthetic construct; identical to SEQ ID NO: 529
  misc_feature 1..1260: note = Synthetic
  source 1..1260: mol_type = other DNA

SEQ ID NO: 746 - DNA, 1935 bp, synthetic construct
  misc_feature 1..1935: note = Synthetic
  source 1..1935: mol_type = other DNA
atggacatgagggtgcccgctcagctcctggggctcctgctgctgtggctgagaggtgcgcgctgtcaggtgcagctggtgcagtctggggctgaggtgaagaagcctggggcctcagtgaaggtgtcctgcaaggcttctggatacaccttcaccggctactatatgcactgggtgcgacaggcccctggacaagggcttgagtggatgggatggttcaaacctaatagtggtgtcacaaactatgcacagaagtttcagggcagggtcaccatgagcagggacacgtccatcagcacagcctacatggagctgagcagcctgagatctgacgacacggccgtgtattactgtgcgagagccggatacagcaccagttggaaagactggttcgacccctggggccagggaaccctggtcaccgtgtcttcagcctccaccaagggcccatcggtcttccccctggcaccctcctccaagagcacctctgggggcacagcggccctgggctgcctggtcaaggactacttccccgaaccggtgacggtgtcgtggaactcaggcgccctgaccagcggcgtgcacaccttcccggctgtcctacagtcctcaggactctactccctcagcagcgtggtgaccgtgccctccagcagcttgggcacccagacctacatctgcaacgtgaatcacaagcccagcaacaccaaggtggacaagaaagttgagcccaaatcttgtgacaaaactcacacatgcccaccgtgcccagcacctgaactcctggggggaccgtcagtcttcctcttccccccaaaacccaaggacaccctcatgatctcccggacccctgaggtcacatgcgtggtggtggacgtgagccacgaagaccctgaggtcaagttcaactggtacgtggacggcgtggaggtgcataatgccaagacaaagccgtgcgaggagcagtacggcagcacgtaccgttgcgtcagcgtcctcaccgtcctgcaccaggactggctgaatggcaaggagtacaagtgcaaggtgtccaacaaagccctcccagcccccatcgagaaaaccatctccaaagccaaagggcagccccgagaaccacaggtgtacaccctgcccccatcccggaaggagatgaccaagaaccaggtcagcctgacctgcctggtcaaaggcttctatcccagcgacatcgccgtggagtgggagagcaatgggcagccggagaacaactacaagaccacgcctcccgtgctgaagtccgacggctccttcttcctctatagcaagctcaccgtggacaagagcaggtggcagcaggggaacgtcttctcatgctccgtgatgcatgaggctctgcacaaccactacacgcagaagagcctctccctgtctcccgggggaggcggtggatcctctccaggtcaaggtactcaatccgaaaactcctgcacccacttcccgggtaacctgccgaacatgctgcgtgacctgcgtgacgctttctcccgtgttaaaaccttcttccagatgaaagaccagctggacaacctgctgctgaaagaatccctgctggaagacttcaaaggttacctgggttgtcaggctctgtccgaaatgatccagttctacctggaagaagttatgccgcaggctgaaaaccaggacccggacatcaaagctcacgttaactccctgggtgaaaacctgaaaaccctgcgtctgcgtctgcgccgttgccatcgattcctgccgtgcgaaaacggtggcggttctggtggtaaatccaaagctgttgaacaggttaaaaacgctttcaacaaactgcaggaaaaaggtatctacttagctatgtccgaattcgacatcttcatcaactacatcgaagcttacatgaccatgaaaatccgtaactag

SEQ ID NO: 747 - DNA, 711 bp, synthetic construct; identical to SEQ ID NO: 448
  misc_feature 1..711: note = Synthetic
  source 1..711: mol_type = other DNA

SEQ ID NO: 748 - DNA, 1260 bp, synthetic construct; identical to SEQ ID NO: 532
  misc_feature 1..1260: note = Synthetic
  source 1..1260: mol_type = other DNA

SEQ ID NO: 749 - DNA, 1935 bp, synthetic construct
  misc_feature 1..1935: note = Synthetic
  source 1..1935: mol_type = other DNA
atggacatgagggtgcccgctcagctcctggggctcctgctgctgtggctgagaggtgcgcgctgtcaggtgcagctggtgcagtctggggctgaggtgaagaagcctggggcctcagtgaaggtgtcctgcaaggcttctggatacaccttcaccggctactatatgcactgggtgcgacaggcccctggacaagggcttgagtggatgggatggttcaaacctaatagtggtgtcacaaactatgcacagaagtttcagggcagggtcaccatgagcagggacacgtccatcagcacagcctacatggagctgagcagcctgagatctgacgacacggccgtgtattactgtgcgagagccggatacagcaccagttggaaagactggttcgacccctggggccagggaaccctggtcaccgtgtcttcagcctccaccaagggcccatcggtcttccccctggcaccctcctccaagagcacctctgggggcacagcggccctgggctgcctggtcaaggactacttccccgaaccggtgacggtgtcgtggaactcaggcgccctgaccagcggcgtgcacaccttcccggctgtcctacagtcctcaggactctactccctcagcagcgtggtgaccgtgccctccagcagcttgggcacccagacctacatctgcaacgtgaatcacaagcccagcaacaccaaggtggacaagaaagttgagcccaaatcttgtgacaaaactcacacatgcccaccgtgcccagcacctgaactcctggggggaccgtcagtcttcctcttccccccaaaacccaaggacaccctcatgatctcccggacccctgaggtcacatgcgtggtggtggacgtgagccacgaagaccctgaggtcaagttcaactggtacgtggacggcgtggaggtgcataatgccaagacaaagccgtgcgaggagcagtacggcagcacgtaccgttgcgtcagcgtcctcaccgtcctgcaccaggactggctgaatggcaaggagtacaagtgcaaggtgtccaacaaagccctcccagcccccatcgagaaaaccatctccaaagccaaagggcagccccgagaaccacaggtgtacaccctgcccccatcccggaaggagatgaccaagaaccaggtcagcctgacctgcctggtcaaaggcttctatcccagcgacatcgccgtggagtgggagagcaatgggcagccggagaacaactacaagaccacgcctcccgtgctgaagtccgacggctccttcttcctctatagcaagctcaccgtggacaagagcaggtggcagcaggggaacgtcttctcatgctccgtgatgcatgaggctctgcacaaccactacacgcagaagagcctctccctgtctcccgggggaggcggtggatcctctccaggtcaaggtactcaatccgaaaactcctgcacccacttcccgggtaacctgccgaacatgctgcgtgacctgcgtgacgctttctcccgtgttaaaaccttcttccagatgaaagaccagctggacaacctgctgctgaaagaatccctgctggaagacttcaaaggttacctgggttgtcaggctctgtccgaaatgatccagttctacctggaagaagttatgccgcaggctgaaaaccaggacccggacatcaaagctcacgttaactccctgggtgaaaacctgaaaaccctgcgtctgcgtctgcgccgttgccatcgattcctgccgtgcgaaaacggtggcggttctggtggtaaatccaaagctgttgaacaggttaaaaacgctttcaacaaactgcaggaaaaaggtatctacgacgctatgtccgaattcgacatcttcatcaactacatcgaagcttacatgaccatgaaaatccgtaactag

SEQ ID NO: 750 - DNA, 711 bp, synthetic construct; identical to SEQ ID NO: 448
  misc_feature 1..711: note = Synthetic
  source 1..711: mol_type = other DNA

SEQ ID NO: 751 - DNA, 1260 bp, synthetic construct; identical to SEQ ID NO: 535
  misc_feature 1..1260: note = Synthetic
  source 1..1260: mol_type = other DNA

SEQ ID NO: 752 - DNA, 1935 bp, synthetic construct
  misc_feature 1..1935: note = Synthetic
  source 1..1935: mol_type = other DNA
atggacatgagggtgcccgctcagctcctggggctcctgctgctgtggctgagaggtgcgcgctgtcaggtgcagctggtgcagtctggggctgaggtgaagaagcctggggcctcagtgaaggtgtcctgcaaggcttctggatacaccttcaccggctactatatgcactgggtgcgacaggcccctggacaagggcttgagtggatgggatggttcaaacctaatagtggtgtcacaaactatgcacagaagtttcagggcagggtcaccatgagcagggacacgtccatcagcacagcctacatggagctgagcagcctgagatctgacgacacggccgtgtattactgtgcgagagccggatacagcaccagttggaaagactggttcgacccctggggccagggaaccctggtcaccgtgtcttcagcctccaccaagggcccatcggtcttccccctggcaccctcctccaagagcacctctgggggcacagcggccctgggctgcctggtcaaggactacttccccgaaccggtgacggtgtcgtggaactcaggcgccctgaccagcggcgtgcacaccttcccggctgtcctacagtcctcaggactctactccctcagcagcgtggtgaccgtgccctccagcagcttgggcacccagacctacatctgcaacgtgaatcacaagcccagcaacaccaaggtggacaagaaagttgagcccaaatcttgtgacaaaactcacacatgcccaccgtgcccagcacctgaactcctggggggaccgtcagtcttcctcttccccccaaaacccaaggacaccctcatgatctcccggacccctgaggtcacatgcgtggtggtggacgtgagccacgaagaccctgaggtcaagttcaactggtacgtggacggcgtggaggtgcataatgccaagacaaagccgtgcgaggagcagtacggcagcacgtaccgttgcgtcagcgtcctcaccgtcctgcaccaggactggctgaatggcaaggagtacaagtgcaaggtgtccaacaaagccctcccagcccccatcgagaaaaccatctccaaagccaaagggcagccccgagaaccacaggtgtacaccctgcccccatcccggaaggagatgaccaagaaccaggtcagcctgacctgcctggtcaaaggcttctatcccagcgacatcgccgtggagtgggagagcaatgggcagccggagaacaactacaagaccacgcctcccgtgctgaagtccgacggctccttcttcctctatagcaagctcaccgtggacaagagcaggtggcagcaggggaacgtcttctcatgctccgtgatgcatgaggctctgcacaaccactacacgcagaagagcctctccctgtctcccgggggaggcggtggatcctctccaggtcaaggtactcaatccgaaaactcctgcacccacttcccgggtaacctgccgaacatgctgcgtgacctgcgtgacgctttctcccgtgttaaaaccttcttccagatgaaaggccagctggacaacctgctgctgaaagaatccctgctggaagacttcaaaggttacctgggttgtcaggctctgtccgaaatgatccagttctacctggaagaagttatgccgcaggctgaaaaccaggacccggacatcaaagctcacgttaactccctgggtgaaaacctgaaaaccctgcgtctgcgtctgcgccgttgccatcgattcctgccgtgcgaaaacggtggcggttctggtggtaaatccaaagctgttgaacaggttaaaaacgctttcaacaaactgcaggaaaaaggtatctacaaagctatgtccgaattcgacatcttcatcaactacatcgaagcttacatgaccatgaaaatccgtaactag

SEQ ID NO: 753 - DNA, 711 bp, synthetic construct; identical to SEQ ID NO: 448
  misc_feature 1..711: note = Synthetic
  source 1..711: mol_type = other DNA

SEQ ID NO: 754 - DNA, 1260 bp, synthetic construct; identical to SEQ ID NO: 538
  misc_feature 1..1260: note = Synthetic
  source 1..1260: mol_type = other DNA

SEQ ID NO: 755 - DNA, 1935 bp, synthetic construct
  misc_feature 1..1935: note = Synthetic
  source 1..1935: mol_type = other DNA
atggacatgagggtgcccgctcagctcctggggctcctgctgctgtggctgagaggtgcgcgctgtcaggtgcagctggtgcagtctggggctgaggtgaagaagcctggggcctcagtgaaggtgtcctgcaaggcttctggatacaccttcaccggctactatatgcactgggtgcgacaggcccctggacaagggcttgagtggatgggatggttcaaacctaatagtggtgtcacaaactatgcacagaagtttcagggcagggtcaccatgagcagggacacgtccatcagcacagcctacatggagctgagcagcctgagatctgacgacacggccgtgtattactgtgcgagagccggatacagcaccagttggaaagactggttcgacccctggggccagggaaccctggtcaccgtgtcttcagcctccaccaagggcccatcggtcttccccctggcaccctcctccaagagcacctctgggggcacagcggccctgggctgcctggtcaaggactacttccccgaaccggtgacggtgtcgtggaactcaggcgccctgaccagcggcgtgcacaccttcccggctgtcctacagtcctcaggactctactccctcagcagcgtggtgaccgtgccctccagcagcttgggcacccagacctacatctgcaacgtgaatcacaagcccagcaacaccaaggtggacaagaaagttgagcccaaatcttgtgacaaaactcacacatgcccaccgtgcccagcacctgaactcctggggggaccgtcagtcttcctcttccccccaaaacccaaggacaccctcatgatctcccggacccctgaggtcacatgcgtggtggtggacgtgagccacgaagaccctgaggtcaagttcaactggtacgtggacggcgtggaggtgcataatgccaagacaaagccgtgcgaggagcagtacggcagcacgtaccgttgcgtcagcgtcctcaccgtcctgcaccaggactggctgaatggcaaggagtacaagtgcaaggtgtccaacaaagccctcccagcccccatcgagaaaaccatctccaaagccaaagggcagccccgagaaccacaggtgtacaccctgcccccatcccggaaggagatgaccaagaaccaggtcagcctgacctgcctggtcaaaggcttctatcccagcgacatcgccgtggagtgggagagcaatgggcagccggagaacaactacaagaccacgcctcccgtgctgaagtccgacggctccttcttcctctatagcaagctcaccgtggacaagagcaggtggcagcaggggaacgtcttctcatgctccgtgatgcatgaggctctgcacaaccactacacgcagaagagcctctccctgtctcccgggggaggcggtggatcctctccaggtcaaggtactcaatccgaaaactcctgcacccacttcccgggtaacctgccgaacatgctgcgtgacctgcgtgacgctttctcccgtgttaaaaccttcttccggatgaaagaccagctggacaacctgctgctgaaagaatccctgctggaagacttcaaaggttacctgggttgtcaggctctgtccgaaatgatccagttctacctggaagaagttatgccgcaggctgaaaaccaggacccggacatcaaagctcacgttaactccctgggtgaaaacctgaaaaccctgcgtctgcgtctgcgccgttgccatcgattcctgccgtgcgaaaacggtggcggttctggtggtaaatccaaagctgttgaacaggttaaaaacgctttcaacaaactgcaggaaaaaggtatctacaaagctatgtccgaattcgacatcttcatcaactacatcgaagcttacatgaccatgaaaatccgtaactag

SEQ ID NO: 756 - DNA, 711 bp, synthetic construct; identical to SEQ ID NO: 448
  misc_feature 1..711: note = Synthetic
  source 1..711: mol_type = other DNA

SEQ ID NO: 757 - DNA, 1260 bp, synthetic construct; identical to SEQ ID NO: 541
  misc_feature 1..1260: note = Synthetic
  source 1..1260: mol_type = other DNA

SEQ ID NO: 758 - DNA, 1935 bp, synthetic construct
  misc_feature 1..1935: note = Synthetic
  source 1..1935: mol_type = other DNA
atggacatgagggtgcccgctcagctcctggggctcctgctgctgtggctgagaggtgcgcgctgtcaggtgcagctggtgcagtctggggctgaggtgaagaagcctggggcctcagtgaaggtgtcctgcaaggcttctggatacaccttcaccggctactatatgcactgggtgcgacaggcccctggacaagggcttgagtggatgggatggttcaaacctaatagtggtgtcacaaactatgcacagaagtttcagggcagggtcaccatgagcagggacacgtccatcagcacagcctacatggagctgagcagcctgagatctgacgacacggccgtgtattactgtgcgagagccggatacagcaccagttggaaagactggttcgacccctggggccagggaaccctggtcaccgtgtcttcagcctccaccaagggcccatcggtcttccccctggcaccctcctccaagagcacctctgggggcacagcggccctgggctgcctggtcaaggactacttccccgaaccggtgacggtgtcgtggaactcaggcgccctgaccagcggcgtgcacaccttcccggctgtcctacagtcctcaggactctactccctcagcagcgtggtgaccgtgccctccagcagcttgggcacccagacctacatctgcaacgtgaatcacaagcccagcaacaccaaggtggacaagaaagttgagcccaaatcttgtgacaaaactcacacatgcccaccgtgcccagcacctgaactcctggggggaccgtcagtcttcctcttccccccaaaacccaaggacaccctcatgatctcccggacccctgaggtcacatgcgtggtggtggacgtgagccacgaagaccctgaggtcaagttcaactggtacgtggacggcgtggaggtgcataatgccaagacaaagccgtgcgaggagcagtacggcagcacgtaccgttgcgtcagcgtcctcaccgtcctgcaccaggactggctgaatggcaaggagtacaagtgcaaggtgtccaacaaagccctcccagcccccatcgagaaaaccatctccaaagccaaagggcagccccgagaaccacaggtgtacaccctgcccccatcccggaaggagatgaccaagaaccaggtcagcctgacctgcctggtcaaaggcttctatcccagcgacatcgccgtggagtgggagagcaatgggcagccggagaacaactacaagaccacgcctcccgtgctgaagtccgacggctccttcttcctctatagcaagctcaccgtggacaagagcaggtggcagcaggggaacgtcttctcatgctccgtgatgcatgaggctctgcacaaccactacacgcagaagagcctctccctgtctcccgggggaggcggtggatcctctccaggtcaaggtactcaatccgaaaactcctgcacccacttcccgggtaacctgccgaacatgctgcgtgacctgcgtgacgctttctcccgtgttaaaaccttcttccagatgaaagaccagctggacaacaagctgctgaaagaatccctgctggaagacttcaaaggttacctgggttgtcaggctctgtccgaaatgatccagttctacctggaagaagttatgccgcaggctgaaaaccaggacccggacatcaaagctcacgttaactccctgggtgaaaacctgaaaaccctgcgtctgcgtctgcgccgttgccatcgattcctgccgtgcgaaaacggtggcggttctggtggtaaatccaaagctgttgaacaggttaaaaacgctttcaacaaactgcaggaaaaaggtatctacaaagctatgtccgaattcgacatcttcatcaactacatcgaagcttacatgaccatgaaaatccgtaactag

SEQ ID NO: 759 - DNA, 711 bp, synthetic construct; identical to SEQ ID NO: 448
  misc_feature 1..711: note = Synthetic
  source 1..711: mol_type = other DNA

SEQ ID NO: 760 - DNA, 1260 bp, synthetic construct; identical to SEQ ID NO: 544
  misc_feature 1..1260: note = Synthetic
  source 1..1260: mol_type = other DNA

SEQ ID NO: 761 - DNA, 1935 bp, synthetic construct
  misc_feature 1..1935: note = Synthetic
  source 1..1935: mol_type = other DNA
atggacatgagggtgcccgctcagctcctggggctcctgctgctgtggctgagaggtgcgcgctgtcaggtgcagctggtgcagtctggggctgaggtgaagaagcctggggcctcagtgaaggtgtcctgcaaggcttctggatacaccttcaccggctactatatgcactgggtgcgacaggcccctggacaagggcttgagtggatgggatggttcaaacctaatagtggtgtcacaaactatgcacagaagtttcagggcagggtcaccatgagcagggacacgtccatcagcacagcctacatggagctgagcagcctgagatctgacgacacggccgtgtattactgtgcgagagccggatacagcaccagttggaaagactggttcgacccctggggccagggaaccctggtcaccgtgtcttcagcctccaccaagggcccatcggtcttccccctggcaccctcctccaagagcacctctgggggcacagcggccctgggctgcctggtcaaggactacttccccgaaccggtgacggtgtcgtggaactcaggcgccctgaccagcggcgtgcacaccttcccggctgtcctacagtcctcaggactctactccctcagcagcgtggtgaccgtgccctccagcagcttgggcacccagacctacatctgcaacgtgaatcacaagcccagcaacaccaaggtggacaagaaagttgagcccaaatcttgtgacaaaactcacacatgcccaccgtgcccagcacctgaactcctggggggaccgtcagtcttcctcttccccccaaaacccaaggacaccctcatgatctcccggacccctgaggtcacatgcgtggtggtggacgtgagccacgaagaccctgaggtcaagttcaactggtacgtggacggcgtggaggtgcataatgccaagacaaagccgtgcgaggagcagtacggcagcacgtaccgttgcgtcagcgtcctcaccgtcctgcaccaggactggctgaatggcaaggagtacaagtgcaaggtgtccaacaaagccctcccagcccccatcgagaaaaccatctccaaagccaaagggcagccccgagaaccacaggtgtacaccctgcccccatcccggaaggagatgaccaagaaccaggtcagcctgacctgcctggtcaaaggcttctatcccagcgacatcgccgtggagtgggagagcaatgggcagccggagaacaactacaagaccacgcctcccgtgctgaagtccgacggctccttcttcctctatagcaagctcaccgtggacaagagcaggtggcagcaggggaacgtcttctcatgctccgtgatgcatgaggctctgcacaaccactacacgcagaagagcctctccctgtctcccgggggaggcggtggatcctctccaggtcaaggtactcaatccgaaaactcctgcacccacttcccgggtaacctgccgaacatgctgcgtgacctgcgtgacgctttctcccgtgttgacaccttcttccagatgaaagaccagctggacaacctgctgctgaaagaatccctgctggaagacttcaaaggttacctgggttgtcaggctctgtccgaaatgatccagttctacctggaagaagttatgccgcaggctgaaaaccaggacccggacatcaaagctcacgttaactccctgggtgaaaacctgaaaaccctgcgtctgcgtctgcgccgttgccatcgattcctgccgtgcgaaaacggtggcggttctggtggtaaatccaaagctgttgaacaggttaaaaacgctttcaacaaactgcaggaaaaaggtatctacaaagctatgtccgaattcgacatcttcatcaactacatcgaagcttacatgaccatgaaaatccgtaactag

SEQ ID NO: 762 - DNA, 711 bp, synthetic construct; identical to SEQ ID NO: 448
  misc_feature 1..711: note = Synthetic
  source 1..711: mol_type = other DNA

SEQ ID NO: 763 - DNA, 1260 bp, synthetic construct; identical to SEQ ID NO: 547
  misc_feature 1..1260: note = Synthetic
  source 1..1260: mol_type = other DNA

SEQ ID NO: 764 - DNA, 1935 bp, synthetic construct
  misc_feature 1..1935: note = Synthetic
  source 1..1935: mol_type = other DNA
atggacatgagggtgcccgctcagctcctggggctcctgctgctgtggctgagaggtgcgcgctgtcaggtgcagctggtgcagtctggggctgaggtgaagaagcctggggcctcagtgaaggtgtcctgcaaggcttctggatacaccttcaccggctactatatgcactgggtgcgacaggcccctggacaagggcttgagtggatgggatggttcaaacctaatagtggtgtcacaaactatgcacagaagtttcagggcagggtcaccatgagcagggacacgtccatcagcacagcctacatggagctgagcagcctgagatctgacgacacggccgtgtattactgtgcgagagccggatacagcaccagttggaaagactggttcgacccctggggccagggaaccctggtcaccgtgtcttcagcctccaccaagggcccatcggtcttccccctggcaccctcctccaagagcacctctgggggcacagcggccctgggctgcctggtcaaggactacttccccgaaccggtgacggtgtcgtggaactcaggcgccctgaccagcggcgtgcacaccttcccggctgtcctacagtcctcaggactctactccctcagcagcgtggtgaccgtgccctccagcagcttgggcacccagacctacatctgcaacgtgaatcacaagcccagcaacaccaaggtggacaagaaagttgagcccaaatcttgtgacaaaactcacacatgcccaccgtgcccagcacctgaactcctggggggaccgtcagtcttcctcttccccccaaaacccaaggacaccctcatgatctcccggacccctgaggtcacatgcgtggtggtggacgtgagccacgaagaccctgaggtcaagttcaactggtacgtggacggcgtggaggtgcataatgccaagacaaagccgtgcgaggagcagtacggcagcacgtaccgttgcgtcagcgtcctcaccgtcctgcaccaggactggctgaatggcaaggagtacaagtgcaaggtgtccaacaaagccctcccagcccccatcgagaaaaccatctccaaagccaaagggcagccccgagaaccacaggtgtacaccctgcccccatcccggaaggagatgaccaagaaccaggtcagcctgacctgcctggtcaaaggcttctatcccagcgacatcgccgtggagtgggagagcaatgggcagccggagaacaactacaagaccacgcctcccgtgctgaagtccgacggctccttcttcctctatagcaagctcaccgtggacaagagcaggtggcagcaggggaacgtcttctcatgctccgtgatgcatgaggctctgcacaaccactacacgcagaagagcctctccctgtctcccgggggaggcggtggatcctctccaggtcaaggtactcaatccgaaaactcctgcacccacttcccgggtaacctgccgaacatgctgcgtgacctgcgtgacgctttctcccgtgttaaaaccttcttcgagatgaaagaccagctggacaacctgctgctgaaagaatccctgctggaagacttcaaaggttacctgggttgtcaggctctgtccgaaatgatccagttctacctggaagaagttatgccgcaggctgaaaaccaggacccggacatcaaagctcacgttaactccctgggtgaaaacctgaaaaccctgcgtctgcgtctgcgccgttgccatcgattcctgccgtgcgaaaacggtggcggttctggtggtaaatccaaagctgttgaacaggttaaaaacgctttcaacaaactgcaggaaaaaggtatctacaaagctatgtccgaattcgacatcttcatcaactacatcgaagcttacatgaccatgaaaatccgtaactag

SEQ ID NO: 765 - DNA, 711 bp, synthetic construct; identical to SEQ ID NO: 448
  misc_feature 1..711: note = Synthetic
  source 1..711: mol_type = other DNA

SEQ ID NO: 766 - DNA, 1260 bp, synthetic construct; identical to SEQ ID NO: 550
  misc_feature 1..1260: note = Synthetic
  source 1..1260: mol_type = other DNA

SEQ ID NO: 767 - DNA, 1932 bp, synthetic construct
  misc_feature 1..1932: note = Synthetic
  source 1..1932: mol_type = other DNA
atggacatgagggtgcccgctcagctcctggggctcctgctgctgtggctgagaggtgcgcgctgtcaggtgcagctggtgcagtctggggctgaggtgaagaagcctggggcctcagtgaaggtgtcctgcaaggcttctggatacaccttcaacggctactatatccactgggtgcgacaggcccctggacaagggcttgagtggatgggatggctcaacccaaacagtggtggcgcaaactatgcacagaagtttcagggctgggtcaccatgaccagggacacgtccatcagcacagcctacatggagctgagcaggctgacatctgacgacacggccgtgtattactgtgcgagagatcagaggaagaccacggtgactccctttgagtactggggccagggaaccctggtcaccgtgtcctcagcctccaccaagggcccatcggtcttccccctggcaccctcctccaagagcacctctgggggcacagcggccctgggctgcctggtcaaggactacttccccgaaccggtgacggtgtcgtggaactcaggcgccctgaccagcggcgtgcacaccttcccggctgtcctacagtcctcaggactctactccctcagcagcgtggtgaccgtgccctccagcagcttgggcacccagacctacatctgcaacgtgaatcacaagcccagcaacaccaaggtggacaagaaagttgagcccaaatcttgtgacaaaactcacacatgcccaccgtgcccagcacctgaactcctggggggaccgtcagtcttcctcttccccccaaaacccaaggacaccctcatgatctcccggacccctgaggtcacatgcgtggtggtggacgtgagccacgaagaccctgaggtcaagttcaactggtacgtggacggcgtggaggtgcataatgccaagacaaagccgtgcgaggagcagtacggcagcacgtaccgttgcgtcagcgtcctcaccgtcctgcaccaggactggctgaatggcaaggagtacaagtgcaaggtgtccaacaaagccctcccagcccccatcgagaaaaccatctccaaagccaaagggcagccccgagaaccacaggtgtacaccctgcccccatcccggaaggagatgaccaagaaccaggtcagcctgacctgcctggtcaaaggcttctatcccagcgacatcgccgtggagtgggagagcaatgggcagccggagaacaactacaagaccacgcctcccgtgctgaagtccgacggctccttcttcctctatagcaagctcaccgtggacaagagcaggtggcagcaggggaacgtcttctcatgctccgtgatgcatgaggctctgcacaaccactacacgcagaagagcctctccctgtctcccgggggaggcggtggatcctctccaggtcaaggtactcaatccgaaaactcctgcacccacttcccgggtaacctgccgaacatgctgcgtgacctgcttgacgctttctcccgtgttaaaaccttcttccagatgaaagaccagctggacaacctgctgctgaaagaatccctgctggaagacttcaaaggttacctgggttgtcaggctctgtccgaaatgatccagttctacctggaagaagttatgccgcaggctgaaaaccaggacccggacatcaaagctcacgttaactccctgggtgaaaacctgaaaaccctgcgtctgcgtctgcgccgttgccatcgattcctgccgtgcgaaaacggtggcggttctggtggtaaatccaaagctgttgaacaggttaaaaacgctttcaacaaactgcaggaaaaaggtatctacaaagctatgtccgaattcgacatcttcatcaactacatcgaagcttacatgaccatgaaaatccgtaactag

SEQ ID NO: 768 - DNA, 693 bp, synthetic construct; identical to SEQ ID NO: 464
  misc_feature 1..693: note = Synthetic
  source 1..693: mol_type = other DNA

SEQ ID NO: 769 - DNA, 1260 bp, synthetic construct; identical to SEQ ID NO: 529
  misc_feature 1..1260: note = Synthetic
  source 1..1260: mol_type = other DNA

SEQ ID NO: 770 - DNA, 1932 bp, synthetic construct
  misc_feature 1..1932: note = Synthetic
  source 1..1932: mol_type = other DNA
atggacatgagggtgcccgctcagctcctggggctcctgctgctgtggctgagaggtgcgcgctgtcaggtgcagctggtgcagtctggggctgaggtgaagaagcctggggcctcagtgaaggtgtcctgcaaggcttctggatacaccttcaacggctactatatccactgggtgcgacaggcccctggacaagggcttgagtggatgggatggctcaacccaaacagtggtggcgcaaactatgcacagaagtttcagggctgggtcaccatgaccagggacacgtccatcagcacagcctacatggagctgagcaggctgacatctgacgacacggccgtgtattactgtgcgagagatcagaggaagaccacggtgactccctttgagtactggggccagggaaccctggtcaccgtgtcctcagcctccaccaagggcccatcggtcttccccctggcaccctcctccaagagcacctctgggggcacagcggccctgggctgcctggtcaaggactacttccccgaaccggtgacggtgtcgtggaactcaggcgccctgaccagcggcgtgcacaccttcccggctgtcctacagtcctcaggactctactccctcagcagcgtggtgaccgtgccctccagcagcttgggcacccagacctacatctgcaacgtgaatcacaagcccagcaacaccaaggtggacaagaaagttgagcccaaatcttgtgacaaaactcacacatgcccaccgtgcccagcacctgaactcctggggggaccgtcagtcttcctcttccccccaaaacccaaggacaccctcatgatctcccggacccctgaggtcacatgcgtggtggtggacgtgagccacgaagaccctgaggtcaagttcaactggtacgtggacggcgtggaggtgcataatgccaagacaaagccgtgcgaggagcagtacggcagcacgtaccgttgcgtcagcgtcctcaccgtcctgcaccaggactggctgaatggcaaggagtacaagtgcaaggtgtccaacaaagccctcccagcccccatcgagaaaaccatctccaaagccaaagggcagccccgagaaccacaggtgtacaccctgcccccatcccggaaggagatgaccaagaaccaggtcagcctgacctgcctggtcaaaggcttctatcccagcgacatcgccgtggagtgggagagcaatgggcagccggagaacaactacaagaccacgcctcccgtgctgaagtccgacggctccttcttcctctatagcaagctcaccgtggacaagagcaggtggcagcaggggaacgtcttctcatgctccgtgatgcatgaggctctgcacaaccactacacgcagaagagcctctccctgtctcccgggggaggcggtggatcctctccaggtcaaggtactcaatccgaaaactcctgcacccacttcccgggtaacctgccgaacatgctgcgtgacctgcgtgacgctttctcccgtgttaaaaccttcttccagatgaaagaccagctggacaacctgctgctgaaagaatccctgctggaagacttcaaaggttacctgggttgtcaggctctgtccgaaatgatccagttctacctggaagaagttatgccgcaggctgaaaaccaggacccggacatcaaagctcacgttaactccctgggtgaaaacctgaaaaccctgcgtctgcgtctgcgccgttgccatcgattcctgccgtgcgaaaacggtggcggttctggtggtaaatccaaagctgttgaacaggttaaaaacgctttcaacaaactgcaggaaaaaggtatctacttagctatgtccgaattcgacatcttcatcaactacatcgaagcttacatgaccatgaaaatccgtaactag

SEQ ID NO: 771 - DNA, 693 bp, synthetic construct; identical to SEQ ID NO: 464
  misc_feature 1..693: note = Synthetic
  source 1..693: mol_type = other DNA

SEQ ID NO: 772 - DNA, 1260 bp, synthetic construct; identical to SEQ ID NO: 532
  misc_feature 1..1260: note = Synthetic
  source 1..1260: mol_type = other DNA

SEQ ID NO: 773 - DNA, 1932 bp, synthetic construct
  misc_feature 1..1932: note = Synthetic
  source 1..1932: mol_type = other DNA
atggacatgagggtgcccgctcagctcctggggctcctgctgctgtggctgagaggtgcgcgctgtcaggtgcagctggtgcagtctggggctgaggtgaagaagcctggggcctcagtgaaggtgtcctgcaaggcttctggatacaccttcaacggctactatatccactgggtgcgacaggcccctggacaagggcttgagtggatgggatggctcaacccaaacagtggtggcgcaaactatgcacagaagtttcagggctgggtcaccatgaccagggacacgtccatcagcacagcctacatggagctgagcaggctgacatctgacgacacggccgtgtattactgtgcgagagatcagaggaagaccacggtgactccctttgagtactggggccagggaaccctggtcaccgtgtcctcagcctccaccaagggcccatcggtcttccccctggcaccctcctccaagagcacctctgggggcacagcggccctgggctgcctggtcaaggactacttccccgaaccggtgacggtgtcgtggaactcaggcgccctgaccagcggcgtgcacaccttcccggctgtcctacagtcctcaggactctactccctcagcagcgtggtgaccgtgccctccagcagcttgggcacccagacctacatctgcaacgtgaatcacaagcccagcaacaccaaggtggacaagaaagttgagcccaaatcttgtgacaaaactcacacatgcccaccgtgcccagcacctgaactcctggggggaccgtcagtcttcctcttccccccaaaacccaaggacaccctcatgatctcccggacccctgaggtcacatgcgtggtggtggacgtgagccacgaagaccctgaggtcaagttcaactggtacgtggacggcgtggaggtgcataatgccaagacaaagccgtgcgaggagcagtacggcagcacgtaccgttgcgtcagcgtcctcaccgtcctgcaccaggactggctgaatggcaaggagtacaagtgcaaggtgtccaacaaagccctcccagcccccatcgagaaaaccatctccaaagccaaagggcagccccgagaaccacaggtgtacaccctgcccccatcccggaaggagatgaccaagaaccaggtcagcctgacctgcctggtcaaaggcttctatcccagcgacatcgccgtggagtgggagagcaatgggcagccggagaacaactacaagaccacgcctcccgtgctgaagtccgacggctccttcttcctctatagcaagctcaccgtggacaagagcaggtggcagcaggggaacgtcttctcatgctccgtgatgcatgaggctctgcacaaccactacacgcagaagagcctctccctgtctcccgggggaggcggtggatcctctccaggtcaaggtactcaatccgaaaactcctgcacccacttcccgggtaacctgccgaacatgctgcgtgacctgcgtgacgctttctcccgtgttaaaaccttcttccagatgaaagaccagctggacaacctgctgctgaaagaatccctgctggaagacttcaaaggttacctgggttgtcaggctctgtccgaaatgatccagttctacctggaagaagttatgccgcaggctgaaaaccaggacccggacatcaaagctcacgttaactccctgggtgaaaacctgaaaaccctgcgtctgcgtctgcgccgttgccatcgattcctgccgtgcgaaaacggtggcggttctggtggtaaatccaaagctgttgaacaggttaaaaacgctttcaacaaactgcaggaaaaaggtatctacgacgctatgtccgaattcgacatcttcatcaactacatcgaagcttacatgaccatgaaaatccgtaactag

SEQ ID NO: 774 - DNA, 693 bp, synthetic construct; identical to SEQ ID NO: 464
  misc_feature 1..693: note = Synthetic
  source 1..693: mol_type = other DNA

SEQ ID NO: 775 - DNA, 1260 bp, synthetic construct; identical to SEQ ID NO: 535
  misc_feature 1..1260: note = Synthetic
  source 1..1260: mol_type = other DNA

SEQ ID NO: 776 - DNA, 1932 bp, synthetic construct
  misc_feature 1..1932: note = Synthetic
  source 1..1932: mol_type = other DNA
atggacatgagggtgcccgctcagctcctggggctcctgctgctgtggctgagaggtgcgcgctgtcaggtgcagctggtgcagtctggggctgaggtgaagaagcctggggcctcagtgaaggtgtcctgcaaggcttctggatacaccttcaacggctactatatccactgggtgcgacaggcccctggacaagggcttgagtggatgggatggctcaacccaaacagtggtggcgcaaactatgcacagaagtttcagggctgggtcaccatgaccagggacacgtccatcagcacagcctacatggagctgagcaggctgacatctgacgacacggccgtgtattactgtgcgagagatcagaggaagaccacggtgactccctttgagtactggggccagggaaccctggtcaccgtgtcctcagcctccaccaagggcccatcggtcttccccctggcaccctcctccaagagcacctctgggggcacagcggccctgggctgcctggtcaaggactacttccccgaaccggtgacggtgtcgtggaactcaggcgccctgaccagcggcgtgcacaccttcccggctgtcctacagtcctcaggactctactccctcagcagcgtggtgaccgtgccctccagcagcttgggcacccagacctacatctgcaacgtgaatcacaagcccagcaacaccaaggtggacaagaaagttgagcccaaatcttgtgacaaaactcacacatgcccaccgtgcccagcacctgaactcctggggggaccgtcagtcttcctcttccccccaaaacccaaggacaccctcatgatctcccggacccctgaggtcacatgcgtggtggtggacgtgagccacgaagaccctgaggtcaagttcaactggtacgtggacggcgtggaggtgcataatgccaagacaaagccgtgcgaggagcagtacggcagcacgtaccgttgcgtcagcgtcctcaccgtcctgcaccaggactggctgaatggcaaggagtacaagtgcaaggtgtccaacaaagccctcccagcccccatcgagaaaaccatctccaaagccaaagggcagccccgagaaccacaggtgtacaccctgcccccatcccggaaggagatgaccaagaaccaggtcagcctgacctgcctggtcaaaggcttctatcccagcgacatcgccgtggagtgggagagcaatgggcagccggagaacaactacaagaccacgcctcccgtgctgaagtccgacggctccttcttcctctatagcaagctcaccgtggacaagagcaggtggcagcaggggaacgtcttctcatgctccgtgatgcatgaggctctgcacaaccactacacgcagaagagcctctccctgtctcccgggggaggcggtggatcctctccaggtcaaggtactcaatccgaaaactcctgcacccacttcccgggtaacctgccgaacatgctgcgtgacctgcgtgacgctttctcccgtgttaaaaccttcttccagatgaaaggccagctggacaacctgctgctgaaagaatccctgctggaagacttcaaaggttacctgggttgtcaggctctgtccgaaatgatccagttctacctggaagaagttatgccgcaggctgaaaaccaggacccggacatcaaagctcacgttaactccctgggtgaaaacctgaaaaccctgcgtctgcgtctgcgccgttgccatcgattcctgccgtgcgaaaacggtggcggttctggtggtaaatccaaagctgttgaacaggttaaaaacgctttcaacaaactgcaggaaaaaggtatctacaaagctatgtccgaattcgacatcttcatcaactacatcgaagcttacatgaccatgaaaatccgtaactag

SEQ ID NO: 777 - DNA, 693 bp, synthetic construct; identical to SEQ ID NO: 464
  misc_feature 1..693: note = Synthetic
  source 1..693: mol_type = other DNA

SEQ ID NO: 778 - DNA, 1260 bp, synthetic construct; identical to SEQ ID NO: 538
  misc_feature 1..1260: note = Synthetic
  source 1..1260: mol_type = other DNA

SEQ ID NO: 779 - DNA, 1932 bp, synthetic construct
  misc_feature 1..1932: note = Synthetic
  source 1..1932: mol_type = other DNA
atggacatgagggtgcccgctcagctcctggggctcctgctgctgtggctgagaggtgcgcgctgtcaggtgcagctggtgcagtctggggctgaggtgaagaagcctggggcctcagtgaaggtgtcctgcaaggcttctggatacaccttcaacggctactatatccactgggtgcgacaggcccctggacaagggcttgagtggatgggatggctcaacccaaacagtggtggcgcaaactatgcacagaagtttcagggctgggtcaccatgaccagggacacgtccatcagcacagcctacatggagctgagcaggctgacatctgacgacacggccgtgtattactgtgcgagagatcagaggaagaccacggtgactccctttgagtactggggccagggaaccctggtcaccgtgtcctcagcctccaccaagggcccatcggtcttccccctggcaccctcctccaagagcacctctgggggcacagcggccctgggctgcctggtcaaggactacttccccgaaccggtgacggtgtcgtggaactcaggcgccctgaccagcggcgtgcacaccttcccggctgtcctacagtcctcaggactctactccctcagcagcgtggtgaccgtgccctccagcagcttgggcacccagacctacatctgcaacgtgaatcacaagcccagcaacaccaaggtggacaagaaagttgagcccaaatcttgtgacaaaactcacacatgcccaccgtgcccagcacctgaactcctggggggaccgtcagtcttcctcttccccccaaaacccaaggacaccctcatgatctcccggacccctgaggtcacatgcgtggtggtggacgtgagccacgaagaccctgaggtcaagttcaactggtacgtggacggcgtggaggtgcataatgccaagacaaagccgtgcgaggagcagtacggcagcacgtaccgttgcgtcagcgtcctcaccgtcctgcaccaggactggctgaatggcaaggagtacaagtgcaaggtgtccaacaaagccctcccagcccccatcgagaaaaccatctccaaagccaaagggcagccccgagaaccacaggtgtacaccctgcccccatcccggaaggagatgaccaagaaccaggtcagcctgacctgcctggtcaaaggcttctatcccagcgacatcgccgtggagtgggagagcaatgggcagccggagaacaactacaagaccacgcctcccgtgctgaagtccgacggctccttcttcctctatagcaagctcaccgtggacaagagcaggtggcagcaggggaacgtcttctcatgctccgtgatgcatgaggctctgcacaaccactacacgcagaagagcctctccctgtctcccgggggaggcggtggatcctctccaggtcaaggtactcaatccgaaaactcctgcacccacttcccgggtaacctgccgaacatgctgcgtgacctgcgtgacgctttctcccgtgttaaaaccttcttccggatgaaagaccagctggacaacctgctgctgaaagaatccctgctggaagacttcaaaggttacctgggttgtcaggctctgtccgaaatgatccagttctacctggaagaagttatgccgcaggctgaaaaccaggacccggacatcaaagctcacgttaactccctgggtgaaaacctgaaaaccctgcgtctgcgtctgcgccgttgccatcgattcctgccgtgcgaaaacggtggcggttctggtggtaaatccaaagctgttgaacaggttaaaaacgctttcaacaaactgcaggaaaaaggtatctacaaagctatgtccgaattcgacatcttcatcaactacatcgaagcttacatgaccatgaaaatccgtaactag

SEQ ID NO: 780 - DNA, 693 bp, synthetic construct; identical to SEQ ID NO: 464
  misc_feature 1..693: note = Synthetic
  source 1..693: mol_type = other DNA

SEQ ID NO: 781 - DNA, 1260 bp, synthetic construct; identical to SEQ ID NO: 541
  misc_feature 1..1260: note = Synthetic
  source 1..1260: mol_type = other DNA

SEQ ID NO: 782 - DNA, 1932 bp, synthetic construct
  misc_feature 1..1932: note = Synthetic
  source 1..1932: mol_type = other DNA
atggacatgagggtgcccgctcagctcctggggctcctgctgctgtggctgagaggtgcgcgctgtcaggtgcagctggtgcagtctggggctgaggtgaagaagcctggggcctcagtgaaggtgtcctgcaaggcttctggatacaccttcaacggctactatatccactgggtgcgacaggcccctggacaagggcttgagtggatgggatggctcaacccaaacagtggtggcgcaaactatgcacagaagtttcagggctgggtcaccatgaccagggacacgtccatcagcacagcctacatggagctgagcaggctgacatctgacgacacggccgtgtattactgtgcgagagatcagaggaagaccacggtgactccctttgagtactggggccagggaaccctggtcaccgtgtcctcagcctccaccaagggcccatcggtcttccccctggcaccctcctccaagagcacctctgggggcacagcggccctgggctgcctggtcaaggactacttccccgaaccggtgacggtgtcgtggaactcaggcgccctgaccagcggcgtgcacaccttcccggctgtcctacagtcctcaggactctactccctcagcagcgtggtgaccgtgccctccagcagcttgggcacccagacctacatctgcaacgtgaatcacaagcccagcaacaccaaggtggacaagaaagttgagcccaaatcttgtgacaaaactcacacatgcccaccgtgcccagcacctgaactcctggggggaccgtcagtcttcctcttccccccaaaacccaaggacaccctcatgatctcccggacccctgaggtcacatgcgtggtggtggacgtgagccacgaagaccctgaggtcaagttcaactggtacgtggacggcgtggaggtgcataatgccaagacaaagccgtgcgaggagcagtacggcagcacgtaccgttgcgtcagcgtcctcaccgtcctgcaccaggactggctgaatggcaaggagtacaagtgcaaggtgtccaacaaagccctcccagcccccatcgagaaaaccatctccaaagccaaagggcagccccgagaaccacaggtgtacaccctgcccccatcccggaaggagatgaccaagaaccaggtcagcctgacctgcctggtcaaaggcttctatcccagcgacatcgccgtggagtgggagagcaatgggcagccggagaacaactacaagaccacgcctcccgtgctgaagtccgacggctccttcttcctctatagcaagctcaccgtggacaagagcaggtggcagcaggggaacgtcttctcatgctccgtgatgcatgaggctctgcacaaccactacacgcagaagagcctctccctgtctcccgggggaggcggtggatcctctccaggtcaaggtactcaatccgaaaactcctgcacccacttcccgggtaacctgccgaacatgctgcgtgacctgcgtgacgctttctcccgtgttaaaaccttcttccagatgaaagaccagctggacaacaagctgctgaaagaatccctgctggaagacttcaaaggttacctgggttgtcaggctctgtccgaaatgatccagttctacctggaagaagttatgccgcaggctgaaaaccaggacccggacatcaaagctcacgttaactccctgggtgaaaacctgaaaaccctgcgtctgcgtctgcgccgttgccatcgattcctgccgtgcgaaaacggtggcggttctggtggtaaatccaaagctgttgaacaggttaaaaacgctttcaacaaactgcaggaaaaaggtatctacaaagctatgtccgaattcgacatcttcatcaactacatcgaagcttacatgaccatgaaaatccgtaactag

SEQ ID NO: 783 - DNA, 693 bp, synthetic construct; identical to SEQ ID NO: 464
  misc_feature 1..693: note = Synthetic
  source 1..693: mol_type = other DNA

SEQ ID NO: 784 - DNA, 1260 bp, synthetic construct; identical to SEQ ID NO: 544
  misc_feature 1..1260: note = Synthetic
  source 1..1260: mol_type = other DNA

SEQ ID NO: 785 - DNA, 1932 bp, synthetic construct
  misc_feature 1..1932: note = Synthetic
  source 1..1932: mol_type = other DNA
atggacatgagggtgcccgctcagctcctggggctcctgctgctgtggctgagaggtgcgcgctgtcaggtgcagctggtgcagtctggggctgaggtgaagaagcctggggcctcagtgaaggtgtcctgcaaggcttctggatacaccttcaacggctactatatccactgggtgcgacaggcccctggacaagggcttgagtggatgggatggctcaacccaaacagtggtggcgcaaactatgcacagaagtttcagggctgggtcaccatgaccagggacacgtccatcagcacagcctacatggagctgagcaggctgacatctgacgacacggccgtgtattactgtgcgagagatcagaggaagaccacggtgactccctttgagtactggggccagggaaccctggtcaccgtgtcctcagcctccaccaagggcccatcggtcttccccctggcaccctcctccaagagcacctctgggggcacagcggccctgggctgcctggtcaaggactacttccccgaaccggtgacggtgtcgtggaactcaggcgccctgaccagcggcgtgcacaccttcccggctgtcctacagtcctcaggactctactccctcagcagcgtggtgaccgtgccctccagcagcttgggcacccagacctacatctgcaacgtgaatcacaagcccagcaacaccaaggtggacaagaaagttgagcccaaatcttgtgacaaaactcacacatgcccaccgtgcccagcacctgaactcctggggggaccgtcagtcttcctcttccccccaaaacccaaggacaccctcatgatctcccggacccctgaggtcacatgcgtggtggtggacgtgagccacgaagaccctgaggtcaagttcaactggtacgtggacggcgtggaggtgcataatgccaagacaaagccgtgcgaggagcagtacggcagcacgtaccgttgcgtcagcgtcctcaccgtcctgcaccaggactggctgaatggcaaggagtacaagtgcaaggtgtccaacaaagccctcccagcccccatcgagaaaaccatctccaaagccaaagggcagccccgagaaccacaggtgtacaccctgcccccatcccggaaggagatgaccaagaaccaggtcagcctgacctgcctggtcaaaggcttctatcccagcgacatcgccgtggagtgggagagcaatgggcagccggagaacaactacaagaccacgcctcccgtgctgaagtccgacggctccttcttcctctatagcaagctcaccgtggacaagagcaggtggcagcaggggaacgtcttctcatgctccgtgatgcatgaggctctgcacaaccactacacgcagaagagcctctccctgtctcccgggggaggcggtggatcctctccaggtcaaggtactcaatccgaaaactcctgcacccacttcccgggtaacctgccgaacatgctgcgtgacctgcgtgacgctttctcccgtgttgacaccttcttccagatgaaagaccagctggacaacctgctgctgaaagaatccctgctggaagacttcaaaggttacctgggttgtcaggctctgtccgaaatgatccagttctacctggaagaagttatgccgcaggctgaaaaccaggacccggacatcaaagctcacgttaactccctgggtgaaaacctgaaaaccctgcgtctgcgtctgcgccgttgccatcgattcctgccgtgcgaaaacggtggcggttctggtggtaaatccaaagctgttgaacaggttaaaaacgctttcaacaaactgcaggaaaaaggtatctacaaagctatgtccgaattcgacatcttcatcaactacatcgaagcttacatgaccatgaaaatccgtaactag

SEQ ID NO: 786 - DNA, 693 bp, synthetic construct; identical to SEQ ID NO: 464
  misc_feature 1..693: note = Synthetic
  source 1..693: mol_type = other DNA

SEQ ID NO: 787 - DNA, 1260 bp, synthetic construct; identical to SEQ ID NO: 547
  misc_feature 1..1260: note = Synthetic
  source 1..1260: mol_type = other DNA

SEQ ID NO: 788 - DNA, 1932 bp, synthetic construct
  misc_feature 1..1932: note = Synthetic
  source 1..1932: mol_type = other DNA
atggacatgagggtgcccgctcagctcctggggctcctgctgctgtggctgagaggtgcgcgctgtcaggtgcagctggtgcagtctggggctgaggtgaagaagcctggggcctcagtgaaggtgtcctgcaaggcttctggatacaccttcaacggctactatatccactgggtgcgacaggcccctggacaagggcttgagtggatgggatggctcaacccaaacagtggtggcgcaaactatgcacagaagtttcagggctgggtcaccatgaccagggacacgtccatcagcacagcctacatggagctgagcaggctgacatctgacgacacggccgtgtattactgtgcgagagatcagaggaagaccacggtgactccctttgagtactggggccagggaaccctggtcaccgtgtcctcagcctccaccaagggcccatcggtcttccccctggcaccctcctccaagagcacctctgggggcacagcggccctgggctgcctggtcaaggactacttccccgaaccggtgacggtgtcgtggaactcaggcgccctgaccagcggcgtgcacaccttcccggctgtcctacagtcctcaggactctactccctcagcagcgtggtgaccgtgccctccagcagcttgggcacccagacctacatctgcaacgtgaatcacaagcccagcaacaccaaggtggacaagaaagttgagcccaaatcttgtgacaaaactcacacatgcccaccgtgcccagcacctgaactcctggggggaccgtcagtcttcctcttccccccaaaacccaaggacaccctcatgatctcccggacccctgaggtcacatgcgtggtggtggacgtgagccacgaagaccctgaggtcaagttcaactggtacgtggacggcgtggaggtgcataatgccaagacaaagccgtgcgaggagcagtacggcagcacgtaccgttgcgtcagcgtcctcaccgtcctgcaccaggactggctgaatggcaaggagtacaagtgcaaggtgtccaacaaagccctcccagcccccatcgagaaaaccatctccaaagccaaagggcagccccgagaaccacaggtgtacaccctgcccccatcccggaaggagatgaccaagaaccaggtcagcctgacctgcctggtcaaaggcttctatcccagcgacatcgccgtggagtgggagagcaatgggcagccggagaacaactacaagaccacgcctcccgtgctgaagtccgacggctccttcttcctctatagcaagctcaccgtggacaagagcaggtggcagcaggggaacgtcttctcatgctccgtgatgcatgaggctctgcacaaccactacacgcagaagagcctctccctgtctcccgggggaggcggtggatcctctccaggtcaaggtactcaatccgaaaactcctgcacccacttcccgggtaacctgccgaacatgctgcgtgacctgcgtgacgctttctcccgtgttaaaaccttcttcgagatgaaagaccagctggacaacctgctgctgaaagaatccctgctggaagacttcaaaggttacctgggttgtcaggctctgtccgaaatgatccagttctacctggaagaagttatgccgcaggctgaaaaccaggacccggacatcaaagctcacgttaactccctgggtgaaaacctgaaaaccctgcgtctgcgtctgcgccgttgccatcgattcctgccgtgcgaaaacggtggcggttctggtggtaaatccaaagctgttgaacaggttaaaaacgctttcaacaaactgcaggaaaaaggtatctacaaagctatgtccgaattcgacatcttcatcaactacatcgaagcttacatgaccatgaaaatccgtaactag

SEQ ID NO: 789 - DNA, 693 bp, synthetic construct; identical to SEQ ID NO: 464
  misc_feature 1..693: note = Synthetic
  source 1..693: mol_type = other DNA

SEQ ID NO: 790 - DNA, 1260 bp, synthetic construct; identical to SEQ ID NO: 550
  misc_feature 1..1260: note = Synthetic
  source 1..1260: mol_type = other DNA

SEQ ID NO: 791 - DNA, 1935 bp, synthetic construct
  misc_feature 1..1935: note = Synthetic
  source 1..1935: mol_type = other DNA
atggacatgagggtgcccgctcagctcctggggctcctgctgctgtggctgagaggtgcgcgctgtcaggtgcaactggtgcagtctggggctgaggtgacgaagcctggggcctcagtgaaggtgtcctgcaaggcttctggatacaccttcaccagatatgatatcaactgggtgcgacaggccactggacaagggcttgagtggatgggatggatgaaccctaacagtggtaattcaggctctgtacagaaattccggggcagagtcaccatgaccagggacacctccatcaccacagtctatatggaactgagcagcctgagatctgatgacacggccgtgtattactgtgcgagaggaggaattagcagcagctggcactgggcttttgatatctggggccaagggacaatggtcaccgtgtcttcagcctccaccaagggcccatcggtcttccccctggcaccctcctccaagagcacctctgggggcacagcggccctgggctgcctggtcaaggactacttccccgaaccggtgacggtgtcgtggaactcaggcgccctgaccagcggcgtgcacaccttcccggctgtcctacagtcctcaggactctactccctcagcagcgtggtgaccgtgccctccagcagcttgggcacccagacctacatctgcaacgtgaatcacaagcccagcaacaccaaggtggacaagaaagttgagcccaaatcttgtgacaaaactcacacatgcccaccgtgcccagcacctgaactcctggggggaccgtcagtcttcctcttccccccaaaacccaaggacaccctcatgatctcccggacccctgaggtcacatgcgtggtggtggacgtgagccacgaagaccctgaggtcaagttcaactggtacgtggacggcgtggaggtgcataatgccaagacaaagccgtgcgaggagcagtacggcagcacgtaccgttgcgtcagcgtcctcaccgtcctgcaccaggactggctgaatggcaaggagtacaagtgcaaggtgtccaacaaagccctcccagcccccatcgagaaaaccatctccaaagccaaagggcagccccgagaaccacaggtgtacaccctgcccccatcccggaaggagatgaccaagaaccaggtcagcctgacctgcctggtcaaaggcttctatcccagcgacatcgccgtggagtgggagagcaatgggcagccggagaacaactacaagaccacgcctcccgtgctgaagtccgacggctccttcttcctctatagcaagctcaccgtggacaagagcaggtggcagcaggggaacgtcttctcatgctccgtgatgcatgaggctctgcacaaccactacacgcagaagagcctctccctgtctcccgggggaggcggtggatcctctccaggtcaaggtactcaatccgaaaactcctgcacccacttcccgggtaacctgccgaacatgctgcgtgacctgcttgacgctttctcccgtgttaaaaccttcttccagatgaaagaccagctggacaacctgctgctgaaagaatccctgctggaagacttcaaaggttacctgggttgtcaggctctgtccgaaatgatccagttctacctggaagaagttatgccgcaggctgaaaaccaggacccggacatcaaagctcacgttaactccctgggtgaaaacctgaaaaccctgcgtctgcgtctgcgccgttgccatcgattcctgccgtgcgaaaacggtggcggttctggtggtaaatccaaagctgttgaacaggttaaaaacgctttcaacaaactgcaggaaaaaggtatctacaaagctatgtccgaattcgacatcttcatcaactacatcgaagcttacatgaccatgaaaatccgtaactag

SEQ ID NO: 792 - DNA, 711 bp, synthetic construct; identical to SEQ ID NO: 480
  misc_feature 1..711: note = Synthetic
  source 1..711: mol_type = other DNA

SEQ ID NO: 793 - DNA, 1260 bp, synthetic construct; identical to SEQ ID NO: 529
  misc_feature 1..1260: note = Synthetic
  source 1..1260: mol_type = other DNA

SEQ ID NO: 794 - DNA, 1935 bp, synthetic construct
  misc_feature 1..1935: note = Synthetic
  source 1..1935: mol_type = other DNA
atggacatgagggtgcccgctcagctcctggggctcctgctgctgtggctgagaggtgcgcgctgtcaggtgcaactggtgcagtctggggctgaggtgacgaagcctggggcctcagtgaaggtgtcctgcaaggcttctggatacaccttcaccagatatgatatcaactgggtgcgacaggccactggacaagggcttgagtggatgggatggatgaaccctaacagtggtaattcaggctctgtacagaaattccggggcagagtcaccatgaccagggacacctccatcaccacagtctatatggaactgagcagcctgagatctgatgacacggccgtgtattactgtgcgagaggaggaattagcagcagctggcactgggcttttgatatctggggccaagggacaatggtcaccgtgtcttcagcctccaccaagggcccatcggtcttccccctggcaccctcctccaagagcacctctgggggcacagcggccctgggctgcctggtcaaggactacttccccgaaccggtgacggtgtcgtggaactcaggcgccctgaccagcggcgtgcacaccttcccggctgtcctacagtcctcaggactctactccctcagcagcgtggtgaccgtgccctccagcagcttgggcacccagacctacatctgcaacgtgaatcacaagcccagcaacaccaaggtggacaagaaagttgagcccaaatcttgtgacaaaactcacacatgcccaccgtgcccagcacctgaactcctggggggaccgtcagtcttcctcttccccccaaaacccaaggacaccctcatgatctcccggacccctgaggtcacatgcgtggtggtggacgtgagccacgaagaccctgaggtcaagttcaactggtacgtggacggcgtggaggtgcataatgccaagacaaagccgtgcgaggagcagtacggcagcacgtaccgttgcgtcagcgtcctcaccgtcctgcaccaggactggctgaatggcaaggagtacaagtgcaaggtgtccaacaaagccctcccagcccccatcgagaaaaccatctccaaagccaaagggcagccccgagaaccacaggtgtacaccctgcccccatcccggaaggagatgaccaagaaccaggtcagcctgacctgcctggtcaaaggcttctatcccagcgacatcgccgtggagtgggagagcaatgggcagccggagaacaactacaagaccacgcctcccgtgctgaagtccgacggctccttcttcctctatagcaagctcaccgtggacaagagcaggtggcagcaggggaacgtcttctcatgctccgtgatgcatgaggctctgcacaaccactacacgcagaagagcctctccctgtctcccgggggaggcggtggatcctctccaggtcaaggtactcaatccgaaaactcctgcacccacttcccgggtaacctgccgaacatgctgcgtgacctgcgtgacgctttctcccgtgttaaaaccttcttccagatgaaagaccagctggacaacctgctgctgaaagaatccctgctggaagacttcaaaggttacctgggttgtcaggctctgtccgaaatgatccagttctacctggaagaagttatgccgcaggctgaaaaccaggacccggacatcaaagctcacgttaactccctgggtgaaaacctgaaaaccctgcgtctgcgtctgcgccgttgccatcgattcctgccgtgcgaaaacggtggcggttctggtggtaaatccaaagctgttgaacaggttaaaaacgctttcaacaaactgcaggaaaaaggtatctacttagctatgtccgaattcgacatcttcatcaactacatcgaagcttacatgaccatgaaaatccgtaactag

SEQ ID NO: 795 - DNA, 711 bp, synthetic construct; identical to SEQ ID NO: 480
  misc_feature 1..711: note = Synthetic
  source 1..711: mol_type = other DNA

SEQ ID NO: 796 - DNA, 1260 bp, synthetic construct; identical to SEQ ID NO: 532
  misc_feature 1..1260: note = Synthetic
  source 1..1260: mol_type = other DNA

SEQ ID NO: 797 - DNA, 1935 bp, synthetic construct
  misc_feature 1..1935: note = Synthetic
  source 1..1935: mol_type = other DNA
atggacatgagggtgcccgctcagctcctggggctcctgctgctgtggctgagaggtgcgcgctgtcaggtgcaactggtgcagtctggggctgaggtgacgaagcctggggcctcagtgaaggtgtcctgcaaggcttctggatacaccttcaccagatatgatatcaactgggtgcgacaggccactggacaagggcttgagtggatgggatggatgaaccctaacagtggtaattcaggctctgtacagaaattccggggcagagtcaccatgaccagggacacctccatcaccacagtctatatggaactgagcagcctgagatctgatgacacggccgtgtattactgtgcgagaggaggaattagcagcagctggcactgggcttttgatatctggggccaagggacaatggtcaccgtgtcttcagcctccaccaagggcccatcggtcttccccctggcaccctcctccaagagcacctctgggggcacagcggccctgggctgcctggtcaaggactacttccccgaaccggtgacggtgtcgtggaactcaggcgccctgaccagcggcgtgcacaccttcccggctgtcctacagtcctcaggactctactccctcagcagcgtggtgaccgtgccctccagcagcttgggcacccagacctacatctgcaacgtgaatcacaagcccagcaacaccaaggtggacaagaaagttgagcccaaatcttgtgacaaaactcacacatgcccaccgtgcccagcacctgaactcctggggggaccgtcagtcttcctcttccccccaaaacccaaggacaccctcatgatctcccggacccctgaggtcacatgcgtggtggtggacgtgagccacgaagaccctgaggtcaagttcaactggtacgtggacggcgtggaggtgcataatgccaagacaaagccgtgcgaggagcagtacggcagcacgtaccgttgcgtcagcgtcctcaccgtcctgcaccaggactggctgaatggcaaggagtacaagtgcaaggtgtccaacaaagccctcccagcccccatcgagaaaaccatctccaaagccaaagggcagccccgagaaccacaggtgtacaccctgcccccatcccggaaggagatgaccaagaaccaggtcagcctgacctgcctggtcaaaggcttctatcccagcgacatcgccgtggagtgggagagcaatgggcagccggagaacaactacaagaccacgcctcccgtgctgaagtccgacggctccttcttcctctatagcaagctcaccgtggacaagagcaggtggcagcaggggaacgtcttctcatgctccgtgatgcatgaggctctgcacaaccactacacgcagaagagcctctccctgtctcccgggggaggcggtggatcctctccaggtcaaggtactcaatccgaaaactcctgcacccacttcccgggtaacctgccgaacatgctgcgtgacctgcgtgacgctttctcccgtgttaaaaccttcttccagatgaaagaccagctggacaacctgctgctgaaagaatccctgctggaagacttcaaaggttacctgggttgtcaggctctgtccgaaatgatccagttctacctggaagaagttatgccgcaggctgaaaaccaggacccggacatcaaagctcacgttaactccctgggtgaaaacctgaaaaccctgcgtctgcgtctgcgccgttgccatcgattcctgccgtgcgaaaacggtggcggttctggtggtaaatccaaagctgttgaacaggttaaaaacgctttcaacaaactgcaggaaaaaggtatctacgacgctatgtccgaattcgacatcttcatcaactacatcgaagcttacatgaccatgaaaatccgtaactag

SEQ ID NO: 798 - DNA, 711 bp, synthetic construct; identical to SEQ ID NO: 480
  misc_feature 1..711: note = Synthetic
  source 1..711: mol_type = other DNA

SEQ ID NO: 799 - DNA, 1260 bp, synthetic construct; identical to SEQ ID NO: 535
  misc_feature 1..1260: note = Synthetic
  source 1..1260: mol_type = other DNA

SEQ ID NO: 800 - DNA, 1935 bp, synthetic construct
  misc_feature 1..1935: note = Synthetic
  source 1..1935: mol_type = other DNA
atggacatgagggtgcccgctcagctcctggggctcctgctgctgtggctgagaggtgcgcgctgtcaggtgcaactggtgcagtctggggctgaggtgacgaagcctggggcctcagtgaaggtgtcctgcaaggcttctggatacaccttcaccagatatgatatcaactgggtgcgacaggccactggacaagggcttgagtggatgggatggatgaaccctaacagtggtaattcaggctctgtacagaaattccggggcagagtcaccatgaccagggacacctccatcaccacagtctatatggaactgagcagcctgagatctgatgacacggccgtgtattactgtgcgagaggaggaattagcagcagctggcactgggcttttgatatctggggccaagggacaatggtcaccgtgtcttcagcctccaccaagggcccatcggtcttccccctggcaccctcctccaagagcacctctgggggcacagcggccctgggctgcctggtcaaggactacttccccgaaccggtgacggtgtcgtggaactcaggcgccctgaccagcggcgtgcacaccttcccggctgtcctacagtcctcaggactctactccctcagcagcgtggtgaccgtgccctccagcagcttgggcacccagacctacatctgcaacgtgaatcacaagcccagcaacaccaaggtggacaagaaagttgagcccaaatcttgtgacaaaactcacacatgcccaccgtgcccagcacctgaactcctggggggaccgtcagtcttcctcttccccccaaaacccaaggacaccctcatgatctcccggacccctgaggtcacatgcgtggtggtggacgtgagccacgaagaccctgaggtcaagttcaactggtacgtggacggcgtggaggtgcataatgccaagacaaagccgtgcgaggagcagtacggcagcacgtaccgttgcgtcagcgtcctcaccgtcctgcaccaggactggctgaatggcaaggagtacaagtgcaaggtgtccaacaaagccctcccagcccccatcgagaaaaccatctccaaagccaaagggcagccccgagaaccacaggtgtacaccctgcccccatcccggaaggagatgaccaagaaccaggtcagcctgacctgcctggtcaaaggcttctatcccagcgacatcgccgtggagtgggagagcaatgggcagccggagaacaactacaagaccacgcctcccgtgctgaagtccgacggctccttcttcctctatagcaagctcaccgtggacaagagcaggtggcagcaggggaacgtcttctcatgctccgtgatgcatgaggctctgcacaaccactacacgcagaagagcctctccctgtctcccgggggaggcggtggatcctctccaggtcaaggtactcaatccgaaaactcctgcacccacttcccgggtaacctgccgaacatgctgcgtgacctgcgtgacgctttctcccgtgttaaaaccttcttccagatgaaaggccagctggacaacctgctgctgaaagaatccctgctggaagacttcaaaggttacctgggttgtcaggctctgtccgaaatgatccagttctacctggaagaagttatgccgcaggctgaaaaccaggacccggacatcaaagctcacgttaactccctgggtgaaaacctgaaaaccctgcgtctgcgtctgcgccgttgccatcgattcctgccgtgcgaaaacggtggcggttctggtggtaaatccaaagctgttgaacaggttaaaaacgctttcaacaaactgcaggaaaaaggtatctacaaagctatgtccgaattcgacatcttcatcaactacatcgaagcttacatgaccatgaaaatccgtaactag

SEQ ID NO: 801 - DNA, 711 bp, synthetic construct; identical to SEQ ID NO: 480
  misc_feature 1..711: note = Synthetic
  source 1..711: mol_type = other DNA

SEQ ID NO: 802 - DNA, 1260 bp, synthetic construct; identical to SEQ ID NO: 538
  misc_feature 1..1260: note = Synthetic
  source 1..1260: mol_type = other DNA

SEQ ID NO: 803 - DNA, 1935 bp, synthetic construct
  misc_feature 1..1935: note = Synthetic
  source 1..1935: mol_type = other DNA
atggacatgagggtgcccgctcagctcctggggctcctgctgctgtggctgagaggtgcgcgctgtcaggtgcaactggtgcagtctggggctgaggtgacgaagcctggggcctcagtgaaggtgtcctgcaaggcttctggatacaccttcaccagatatgatatcaactgggtgcgacaggccactggacaagggcttgagtggatgggatggatgaaccctaacagtggtaattcaggctctgtacagaaattccggggcagagtcaccatgaccagggacacctccatcaccacagtctatatggaactgagcagcctgagatctgatgacacggccgtgtattactgtgcgagaggaggaattagcagcagctggcactgggcttttgatatctggggccaagggacaatggtcaccgtgtcttcagcctccaccaagggcccatcggtcttccccctggcaccctcctccaagagcacctctgggggcacagcggccctgggctgcctggtcaaggactacttccccgaaccggtgacggtgtcgtggaactcaggcgccctgaccagcggcgtgcacaccttcccggctgtcctacagtcctcaggactctactccctcagcagcgtggtgaccgtgccctccagcagcttgggcacccagacctacatctgcaacgtgaatcacaagcccagcaacaccaaggtggacaagaaagttgagcccaaatcttgtgacaaaactcacacatgcccaccgtgcccagcacctgaactcctggggggaccgtcagtcttcctcttccccccaaaacccaaggacaccctcatgatctcccggacccctgaggtcacatgcgtggtggtggacgtgagccacgaagaccctgaggtcaagttcaactggtacgtggacggcgtggaggtgcataatgccaagacaaagccgtgcgaggagcagtacggcagcacgtaccgttgcgtcagcgtcctcaccgtcctgcaccaggactggctgaatggcaaggagtacaagtgcaaggtgtccaacaaagccctcccagcccccatcgagaaaaccatctccaaagccaaagggcagccccgagaaccacaggtgtacaccctgcccccatcccggaaggagatgaccaagaaccaggtcagcctgacctgcctggtcaaaggcttctatcccagcgacatcgccgtggagtgggagagcaatgggcagccggagaacaactacaagaccacgcctcccgtgctgaagtccgacggctccttcttcctctatagcaagctcaccgtggacaagagcaggtggcagcaggggaacgtcttctcatgctccgtgatgcatgaggctctgcacaaccactacacgcagaagagcctctccctgtctcccgggggaggcggtggatcctctccaggtcaaggtactcaatccgaaaactcctgcacccacttcccgggtaacctgccgaacatgctgcgtgacctgcgtgacgctttctcccgtgttaaaaccttcttccggatgaaagaccagctggacaacctgctgctgaaagaatccctgctggaagacttcaaaggttacctgggttgtcaggctctgtccgaaatgatccagttctacctggaagaagttatgccgcaggctgaaaaccaggacccggacatcaaagctcacgttaactccctgggtgaaaacctgaaaaccctgcgtctgcgtctgcgccgttgccatcgattcctgccgtgcgaaaacggtggcggttctggtggtaaatccaaagctgttgaacaggttaaaaacgctttcaacaaactgcaggaaaaaggtatctacaaagctatgtccgaattcgacatcttcatcaactacatcgaagcttacatgaccatgaaaatccgtaactag

SEQ ID NO: 804 - DNA, 711 bp, synthetic construct; identical to SEQ ID NO: 480
  misc_feature 1..711: note = Synthetic
  source 1..711: mol_type = other DNA

SEQ ID NO: 805 - DNA, 1260 bp, synthetic construct; identical to SEQ ID NO: 541
  misc_feature 1..1260: note = Synthetic
  source 1..1260: mol_type = other DNA

SEQ ID NO: 806 - DNA, 1935 bp, synthetic construct
  misc_feature 1..1935: note = Synthetic
  source 1..1935: mol_type = other DNA
atggacatgagggtgcccgctcagctcctggggctcctgctgctgtggctgagaggtgcgcgctgtcaggtgcaactggtgcagtctggggctgaggtgacgaagcctggggcctcagtgaaggtgtcctgcaaggcttctggatacaccttcaccagatatgatatcaactgggtgcgacaggccactggacaagggcttgagtggatgggatggatgaaccctaacagtggtaattcaggctctgtacagaaattccggggcagagtcaccatgaccagggacacctccatcaccacagtctatatggaactgagcagcctgagatctgatgacacggccgtgtattactgtgcgagaggaggaattagcagcagctggcactgggcttttgatatctggggccaagggacaatggtcaccgtgtcttcagcctccaccaagggcccatcggtcttccccctggcaccctcctccaagagcacctctgggggcacagcggccctgggctgcctggtcaaggactacttccccgaaccggtgacggtgtcgtggaactcaggcgccctgaccagcggcgtgcacaccttcccggctgtcctacagtcctcaggactctactccctcagcagcgtggtgaccgtgccctccagcagcttgggcacccagacctacatctgcaacgtgaatcacaagcccagcaacaccaaggtggacaagaaagttgagcccaaatcttgtgacaaaactcacacatgcccaccgtgcccagcacctgaactcctggggggaccgtcagtcttcctcttccccccaaaacccaaggacaccctcatgatctcccggacccctgaggtcacatgcgtggtggtggacgtgagccacgaagaccctgaggtcaagttcaactggtacgtggacggcgtggaggtgcataatgccaagacaaagccgtgcgaggagcagtacggcagcacgtaccgttgcgtcagcgtcctcaccgtcctgcaccaggactggctgaatggcaaggagtacaagtgcaaggtgtccaacaaagccctcccagcccccatcgagaaaaccatctccaaagccaaagggcagccccgagaaccacaggtgtacaccctgcccccatcccggaaggagatgaccaagaaccaggtcagcctgacctgcctggtcaaaggcttctatcccagcgacatcgccgtggagtgggagagcaatgggcagccggagaacaactacaagaccacgcctcccgtgctgaagtccgacggctccttcttcctctatagcaagctcaccgtggacaagagcaggtggcagcaggggaacgtcttctcatgctccgtgatgcatgaggctctgcacaaccactacacgcagaagagcctctccctgtctcccgggggaggcggtggatcctctccaggtcaaggtactcaatccgaaaactcctgcacccacttcccgggtaacctgccgaacatgctgcgtgacctgcgtgacgctttctcccgtgttaaaaccttcttccagatgaaagaccagctggacaacaagctgctgaaagaatccctgctggaagacttcaaaggttacctgggttgtcaggctctgtccgaaatgatccagttctacctggaagaagttatgccgcaggctgaaaaccaggacccggacatcaaagctcacgttaactccctgggtgaaaacctgaaaaccctgcgtctgcgtctgcgccgttgccatcgattcctgccgtgcgaaaacggtggcggttctggtggtaaatccaaagctgttgaacaggttaaaaacgctttcaacaaactgcaggaaaaaggtatctacaaagctatgtccgaattcgacatcttcatcaactacatcgaagcttacatgaccatgaaaatccgtaactag

SEQ ID NO: 807 - DNA, 711 bp, synthetic construct; identical to SEQ ID NO: 480
  misc_feature 1..711: note = Synthetic
  source 1..711: mol_type = other DNA

SEQ ID NO: 808 - DNA, 1260 bp, synthetic construct; identical to SEQ ID NO: 544
  misc_feature 1..1260: note = Synthetic
  source 1..1260: mol_type = other DNA

SEQ ID NO: 809 - DNA, 1935 bp, synthetic construct
  misc_feature 1..1935: note = Synthetic
  source 1..1935: mol_type = other DNA
atggacatgagggtgcccgctcagctcctggggctcctgctgctgtggctgagaggtgcgcgctgtcaggtgcaactggtgcagtctggggctgaggtgacgaagcctggggcctcagtgaaggtgtcctgcaaggcttctggatacaccttcaccagatatgatatcaactgggtgcgacaggccactggacaagggcttgagtggatgggatggatgaaccctaacagtggtaattcaggctctgtacagaaattccggggcagagtcaccatgaccagggacacctccatcaccacagtctatatggaactgagcagcctgagatctgatgacacggccgtgtattactgtgcgagaggaggaattagcagcagctggcactgggcttttgatatctggggccaagggacaatggtcaccgtgtcttcagcctccaccaagggcccatcggtcttccccctggcaccctcctccaagagcacctctgggggcacagcggccctgggctgcctggtcaaggactacttccccgaaccggtgacggtgtcgtggaactcaggcgccctgaccagcggcgtgcacaccttcccggctgtcctacagtcctcaggactctactccctcagcagcgtggtgaccgtgccctccagcagcttgggcacccagacctacatctgcaacgtgaatcacaagcccagcaacaccaaggtggacaagaaagttgagcccaaatcttgtgacaaaactcacacatgcccaccgtgcccagcacctgaactcctggggggaccgtcagtcttcctcttccccccaaaacccaaggacaccctcatgatctcccggacccctgaggtcacatgcgtggtggtggacgtgagccacgaagaccctgaggtcaagttcaactggtacgtggacggcgtggaggtgcataatgccaagacaaagccgtgcgaggagcagtacggcagcacgtaccgttgcgtcagcgtcctcaccgtcctgcaccaggactggctgaatggcaaggagtacaagtgcaaggtgtccaacaaagccctcccagcccccatcgagaaaaccatctccaaagccaaagggcagccccgagaaccacaggtgtacaccctgcccccatcccggaaggagatgaccaagaaccaggtcagcctgacctgcctggtcaaaggcttctatcccagcgacatcgccgtggagtgggagagcaatgggcagccggagaacaactacaagaccacgcctcccgtgctgaagtccgacggctccttcttcctctatagcaagctcaccgtggacaagagcaggtggcagcaggggaacgtcttctcatgctccgtgatgcatgaggctctgcacaaccactacacgcagaagagcctctccctgtctcccgggggaggcggtggatcctctccaggtcaaggtactcaatccgaaaactcctgcacccacttcccgggtaacctgccgaacatgctgcgtgacctgcgtgacgctttctcccgtgttgacaccttcttccagatgaaagaccagctggacaacctgctgctgaaagaatccctgctggaagacttcaaaggttacctgggttgtcaggctctgtccgaaatgatccagttctacctggaagaagttatgccgcaggctgaaaaccaggacccggacatcaaagctcacgttaactccctgggtgaaaacctgaaaaccctgcgtctgcgtctgcgccgttgccatcgattcctgccgtgcgaaaacggtggcggttctggtggtaaatccaaagctgttgaacaggttaaaaacgctttcaacaaactgcaggaaaaaggtatctacaaagctatgtccgaattcgacatcttcatcaactacatcgaagcttacatgaccatgaaaatccgtaactag

SEQ ID NO: 810 - DNA, 711 bp, synthetic construct; identical to SEQ ID NO: 480
  misc_feature 1..711: note = Synthetic
  source 1..711: mol_type = other DNA

SEQ ID NO: 811 - DNA, 1260 bp, synthetic construct; identical to SEQ ID NO: 547
  misc_feature 1..1260: note = Synthetic
  source 1..1260: mol_type = other DNA

SEQ ID NO: 812 - DNA, 1935 bp, synthetic construct
  misc_feature 1..1935: note = Synthetic
  source 1..1935: mol_type = other DNA
atggacatgagggtgcccgctcagctcctggggctcctgctgctgtggctgagaggtgcgcgctgtcaggtgcaactggtgcagtctggggctgaggtgacgaagcctggggcctcagtgaaggtgtcctgcaaggcttctggatacaccttcaccagatatgatatcaactgggtgcgacaggccactggacaagggcttgagtggatgggatggatgaaccctaacagtggtaattcaggctctgtacagaaattccggggcagagtcaccatgaccagggacacctccatcaccacagtctatatggaactgagcagcctgagatctgatgacacggccgtgtattactgtgcgagaggaggaattagcagcagctggcactgggcttttgatatctggggccaagggacaatggtcaccgtgtcttcagcctccaccaagggcccatcggtcttccccctggcaccctcctccaagagcacctctgggggcacagcggccctgggctgcctggtcaaggactacttccccgaaccggtgacggtgtcgtggaactcaggcgccctgaccagcggcgtgcacaccttcccggctgtcctacagtcctcaggactctactccctcagcagcgtggtgaccgtgccctccagcagcttgggcacccagacctacatctgcaacgtgaatcacaagcccagcaacaccaaggtggacaagaaagttgagcccaaatcttgtgacaaaactcacacatgcccaccgtgcccagcacctgaactcctggggggaccgtcagtcttcctcttccccccaaaacccaaggacaccctcatgatctcccggacccctgaggtcacatgcgtggtggtggacgtgagccacgaagaccctgaggtcaagttcaactggtacgtggacggcgtggaggtgcataatgccaagacaaagccgtgcgaggagcagtacggcagcacgtaccgttgcgtcagcgtcctcaccgtcctgcaccaggactggctgaatggcaaggagtacaagtgcaaggtgtccaacaaagccctcccagcccccatcgagaaaaccatctccaaagccaaagggcagccccgagaaccacaggtgtacaccctgcccccatcccggaaggagatgaccaagaaccaggtcagcctgacctgcctggtcaaaggcttctatcccagcgacatcgccgtggagtgggagagcaatgggcagccggagaacaactacaagaccacgcctcccgtgctgaagtccgacggctccttcttcctctatagcaagctcaccgtggacaagagcaggtggcagcaggggaacgtcttctcatgctccgtgatgcatgaggctctgcacaaccactacacgcagaagagcctctccctgtctcccgggggaggcggtggatcctctccaggtcaaggtactcaatccgaaaactcctgcacccacttcccgggtaacctgccgaacatgctgcgtgacctgcgtgacgctttctcccgtgttaaaaccttcttcgagatgaaagaccagctggacaacctgctgctgaaagaatccctgctggaagacttcaaaggttacctgggttgtcaggctctgtccgaaatgatccagttctacctggaagaagttatgccgcaggctgaaaaccaggacccggacatcaaagctcacgttaactccctgggtgaaaacctgaaaaccctgcgtctgcgtctgcgccgttgccatcgattcctgccgtgcgaaaacggtggcggttctggtggtaaatccaaagctgttgaacaggttaaaaacgctttcaacaaactgcaggaaaaaggtatctacaaagctatgtccgaattcgacatcttcatcaactacatcgaagcttacatgaccatgaaaatccgtaactag

SEQ ID NO: 813 - DNA, 711 bp, synthetic construct; identical to SEQ ID NO: 480
  misc_feature 1..711: note = Synthetic
  source 1..711: mol_type = other DNA

SEQ ID NO: 814 - DNA, 1260 bp, synthetic construct; identical to SEQ ID NO: 550
  misc_feature 1..1260: note = Synthetic
  source 1..1260: mol_type = other DNA

SEQ ID NO: 815 - DNA, 1926 bp, synthetic construct
  misc_feature 1..1926: note = Synthetic
  source 1..1926: mol_type = other DNA
atggacatgagggtgcccgctcagctcctggggctcctgctgctgtggctgagaggtgcgcgctgtgaggtgcagctgttggagtctgggggaggcttggtacagcctggggggtccctgagactctcctgtgcagcctctggattcacctttagcagctatgccatgacctgggtccgccaggctccagggagggggctgcagtgggtgtcaactattagtggtagtggtagtaacacatactacgcagactccgtgaagggccggttcaccatctccagagacaattccaagaacacgctgtatctgcaaatgagcagcctgagagccgaggacacggccgtatattactgtgcgaaagaggggggcagtaaccgatacttccaccactggggccagggcaccctggtcaccatctcctcagcctccaccaagggcccatcggtcttccccctggcaccctcctccaagagcacctctgggggcacagcggccctgggctgcctggtcaaggactacttccccgaaccggtgacggtgtcgtggaactcaggcgccctgaccagcggcgtgcacaccttcccggctgtcctacagtcctcaggactctactccctcagcagcgtggtgaccgtgccctccagcagcttgggcacccagacctacatctgcaacgtgaatcacaagcccagcaacaccaaggtggacaagaaagttgagcccaaatcttgtgacaaaactcacacatgcccaccgtgcccagcacctgaactcctggggggaccgtcagtcttcctcttccccccaaaacccaaggacaccctcatgatctcccggacccctgaggtcacatgcgtggtggtggacgtgagccacgaagaccctgaggtcaagttcaactggtacgtggacggcgtggaggtgcataatgccaagacaaagccgtgcgaggagcagtacggcagcacgtaccgttgcgtcagcgtcctcaccgtcctgcaccaggactggctgaatggcaaggagtacaagtgcaaggtgtccaacaaagccctcccagcccccatcgagaaaaccatctccaaagccaaagggcagccccgagaaccacaggtgtacaccctgcccccatcccggaaggagatgaccaagaaccaggtcagcctgacctgcctggtcaaaggcttctatcccagcgacatcgccgtggagtgggagagcaatgggcagccggagaacaactacaagaccacgcctcccgtgctgaagtccgacggctccttcttcctctatagcaagctcaccgtggacaagagcaggtggcagcaggggaacgtcttctcatgctccgtgatgcatgaggctctgcacaaccactacacgcagaagagcctctccctgtctcccgggggaggcggtggatcctctccaggtcaaggtactcaatccgaaaactcctgcacccacttcccgggtaacctgccgaacatgctgcgtgacctgcttgacgctttctcccgtgttaaaaccttcttccagatgaaagaccagctggacaacctgctgctgaaagaatccctgctggaagacttcaaaggttacctgggttgtcaggctctgtccgaaatgatccagttctacctggaagaagttatgccgcaggctgaaaaccaggacccggacatcaaagctcacgttaactccctgggtgaaaacctgaaaaccctgcgtctgcgtctgcgccgttgccatcgattcctgccgtgcgaaaacggtggcggttctggtggtaaatccaaagctgttgaacaggttaaaaacgctttcaacaaactgcaggaaaaaggtatctacaaagctatgtccgaattcgacatcttcatcaactacatcgaagcttacatgaccatgaaaatccgtaactag

SEQ ID NO: 816 - DNA, 711 bp, synthetic construct; identical to SEQ ID NO: 496
  misc_feature 1..711: note = Synthetic
  source 1..711: mol_type = other DNA

SEQ ID NO: 817 - DNA, 1260 bp, synthetic construct; identical to SEQ ID NO: 529
  misc_feature 1..1260: note = Synthetic
  source 1..1260: mol_type = other DNA

SEQ ID NO: 818 - DNA, 1926 bp, synthetic construct
  misc_feature 1..1926: note = Synthetic
  source 1..1926: mol_type = other DNA
atggacatgagggtgcccgctcagctcctggggctcctgctgctgtggctgagaggtgcgcgctgtgaggtgcagctgttggagtctgggggaggcttggtacagcctggggggtccctgagactctcctgtgcagcctctggattcacctttagcagctatgccatgacctgggtccgccaggctccagggagggggctgcagtgggtgtcaactattagtggtagtggtagtaacacatactacgcagactccgtgaagggccggttcaccatctccagagacaattccaagaacacgctgtatctgcaaatgagcagcctgagagccgaggacacggccgtatattactgtgcgaaagaggggggcagtaaccgatacttccaccactggggccagggcaccctggtcaccatctcctcagcctccaccaagggcccatcggtcttccccctggcaccctcctccaagagcacctctgggggcacagcggccctgggctgcctggtcaaggactacttccccgaaccggtgacggtgtcgtggaactcaggcgccctgaccagcggcgtgcacaccttcccggctgtcctacagtcctcaggactctactccctcagcagcgtggtgaccgtgccctccagcagcttgggcacccagacctacatctgcaacgtgaatcacaagcccagcaacaccaaggtggacaagaaagttgagcccaaatcttgtgacaaaactcacacatgcccaccgtgcccagcacctgaactcctggggggaccgtcagtcttcctcttccccccaaaacccaaggacaccctcatgatctcccggacccctgaggtcacatgcgtggtggtggacgtgagccacgaagaccctgaggtcaagttcaactggtacgtggacggcgtggaggtgcataatgccaagacaaagccgtgcgaggagcagtacggcagcacgtaccgttgcgtcagcgtcctcaccgtcctgcaccaggactggctgaatggcaaggagtacaagtgcaaggtgtccaacaaagccctcccagcccccatcgagaaaaccatctccaaagccaaagggcagccccgagaaccacaggtgtacaccctgcccccatcccggaaggagatgaccaagaaccaggtcagcctgacctgcctggtcaaaggcttctatcccagcgacatcgccgtggagtgggagagcaatgggcagccggagaacaactacaagaccacgcctcccgtgctgaagtccgacggctccttcttcctctatagcaagctcaccgtggacaagagcaggtggcagcaggggaacgtcttctcatgctccgtgatgcatgaggctctgcacaaccactacacgcagaagagcctctccctgtctcccgggggaggcggtggatcctctccaggtcaaggtactcaatccgaaaactcctgcacccacttcccgggtaacctgccgaacatgctgcgtgacctgcgtgacgctttctcccgtgttaaaaccttcttccagatgaaagaccagctggacaacctgctgctgaaagaatccctgctggaagacttcaaaggttacctgggttgtcaggctctgtccgaaatgatccagttctacctggaagaagttatgccgcaggctgaaaaccaggacccggacatcaaagctcacgttaactccctgggtgaaaacctgaaaaccctgcgtctgcgtctgcgccgttgccatcgattcctgccgtgcgaaaacggtggcggttctggtggtaaatccaaagctgttgaacaggttaaaaacgctttcaacaaactgcaggaaaaaggtatctacttagctatgtccgaattcgacatcttcatcaactacatcgaagcttacatgaccatgaaaatccgtaactag

SEQ ID NO: 819 - DNA, 711 bp, synthetic construct; identical to SEQ ID NO: 496
  misc_feature 1..711: note = Synthetic
  source 1..711: mol_type = other DNA

SEQ ID NO: 820 - DNA, 1260 bp, synthetic construct; identical to SEQ ID NO: 532
  misc_feature 1..1260: note = Synthetic
  source 1..1260: mol_type = other DNA

SEQ ID NO: 821 - DNA, 1926 bp, synthetic construct
  misc_feature 1..1926: note = Synthetic
  source 1..1926: mol_type = other DNA
atggacatgagggtgcccgctcagctcctggggctcctgctgctgtggctgagaggtgcgcgctgtgaggtgcagctgttggagtctgggggaggcttggtacagcctggggggtccctgagactctcctgtgcagcctctggattcacctttagcagctatgccatgacctgggtccgccaggctccagggagggggctgcagtgggtgtcaactattagtggtagtggtagtaacacatactacgcagactccgtgaagggccggttcaccatctccagagacaattccaagaacacgctgtatctgcaaatgagcagcctgagagccgaggacacggccgtatattactgtgcgaaagaggggggcagtaaccgatacttccaccactggggccagggcaccctggtcaccatctcctcagcctccaccaagggcccatcggtcttccccctggcaccctcctccaagagcacctctgggggcacagcggccctgggctgcctggtcaaggactacttccccgaaccggtgacggtgtcgtggaactcaggcgccctgaccagcggcgtgcacaccttcccggctgtcctacagtcctcaggactctactccctcagcagcgtggtgaccgtgccctccagcagcttgggcacccagacctacatctgcaacgtgaatcacaagcccagcaacaccaaggtggacaagaaagttgagcccaaatcttgtgacaaaactcacacatgcccaccgtgcccagcacctgaactcctggggggaccgtcagtcttcctcttccccccaaaacccaaggacaccctcatgatctcccggacccctgaggtcacatgcgtggtggtggacgtgagccacgaagaccctgaggtcaagttcaactggtacgtggacggcgtggaggtgcataatgccaagacaaagccgtgcgaggagcagtacggcagcacgtaccgttgcgtcagcgtcctcaccgtcctgcaccaggactggctgaatggcaaggagtacaagtgcaaggtgtccaacaaagccctcccagcccccatcgagaaaaccatctccaaagccaaagggcagccccgagaaccacaggtgtacaccctgcccccatcccggaaggagatgaccaagaaccaggtcagcctgacctgcctggtcaaaggcttctatcccagcgacatcgccgtggagtgggagagcaatgggcagccggagaacaactacaagaccacgcctcccgtgctgaagtccgacggctccttcttcctctatagcaagctcaccgtggacaagagcaggtggcagcaggggaacgtcttctcatgctccgtgatgcatgaggctctgcacaaccactacacgcagaagagcctctccctgtctcccgggggaggcggtggatcctctccaggtcaaggtactcaatccgaaaactcctgcacccacttcccgggtaacctgccgaacatgctgcgtgacctgcgtgacgctttctcccgtgttaaaaccttcttccagatgaaagaccagctggacaacctgctgctgaaagaatccctgctggaagacttcaaaggttacctgggttgtcaggctctgtccgaaatgatccagttctacctggaagaagttatgccgcaggctgaaaaccaggacccggacatcaaagctcacgttaactccctgggtgaaaacctgaaaaccctgcgtctgcgtctgcgccgttgccatcgattcctgccgtgcgaaaacggtggcggttctggtggtaaatccaaagctgttgaacaggttaaaaacgctttcaacaaactgcaggaaaaaggtatctacgacgctatgtccgaattcgacatcttcatcaactacatcgaagcttacatgaccatgaaaatccgtaactag

SEQ ID NO: 822 - DNA, 711 bp, synthetic construct; identical to SEQ ID NO: 496
  misc_feature 1..711: note = Synthetic
  source 1..711: mol_type = other DNA

SEQ ID NO: 823 - DNA, 1260 bp, synthetic construct; identical to SEQ ID NO: 535
  misc_feature 1..1260: note = Synthetic
  source 1..1260: mol_type = other DNA

SEQ ID NO: 824 - DNA, 1926 bp, synthetic construct
  misc_feature 1..1926: note = Synthetic
  source 1..1926: mol_type = other DNA
atggacatgagggtgcccgctcagctcctggggctcctgctgctgtggctgagaggtgcgcgctgtgaggtgcagctgttggagtctgggggaggcttggtacagcctggggggtccctgagactctcctgtgcagcctctggattcacctttagcagctatgccatgacctgggtccgccaggctccagggagggggctgcagtgggtgtcaactattagtggtagtggtagtaacacatactacgcagactccgtgaagggccggttcaccatctccagagacaattccaagaacacgctgtatctgcaaatgagcagcctgagagccgaggacacggccgtatattactgtgcgaaagaggggggcagtaaccgatacttccaccactggggccagggcaccctggtcaccatctcctcagcctccaccaagggcccatcggtcttccccctggcaccctcctccaagagcacctctgggggcacagcggccctgggctgcctggtcaaggactacttccccgaaccggtgacggtgtcgtggaactcaggcgccctgaccagcggcgtgcacaccttcccggctgtcctacagtcctcaggactctactccctcagcagcgtggtgaccgtgccctccagcagcttgggcacccagacctacatctgcaacgtgaatcacaagcccagcaacaccaaggtggacaagaaagttgagcccaaatcttgtgacaaaactcacacatgcccaccgtgcccagcacctgaactcctggggggaccgtcagtcttcctcttccccccaaaacccaaggacaccctcatgatctcccggacccctgaggtcacatgcgtggtggtggacgtgagccacgaagaccctgaggtcaagttcaactggtacgtggacggcgtggaggtgcataatgccaagacaaagccgtgcgaggagcagtacggcagcacgtaccgttgcgtcagcgtcctcaccgtcctgcaccaggactggctgaatggcaaggagtacaagtgcaaggtgtccaacaaagccctcccagcccccatcgagaaaaccatctccaaagccaaagggcagccccgagaaccacaggtgtacaccctgcccccatcccggaaggagatgaccaagaaccaggtcagcctgacctgcctggtcaaaggcttctatcccagcgacatcgccgtggagtgggagagcaatgggcagccggagaacaactacaagaccacgcctcccgtgctgaagtccgacggctccttcttcctctatagcaagctcaccgtggacaagagcaggtggcagcaggggaacgtcttctcatgctccgtgatgcatgaggctctgcacaaccactacacgcagaagagcctctccctgtctcccgggggaggcggtggatcctctccaggtcaaggtactcaatccgaaaactcctgcacccacttcccgggtaacctgccgaacatgctgcgtgacctgcgtgacgctttctcccgtgttaaaaccttcttccagatgaaaggccagctggacaacctgctgctgaaagaatccctgctggaagacttcaaaggttacctgggttgtcaggctctgtccgaaatgatccagttctacctggaagaagttatgccgcaggctgaaaaccaggacccggacatcaaagctcacgttaactccctgggtgaaaacctgaaaaccctgcgtctgcgtctgcgccgttgccatcgattcctgccgtgcgaaaacggtggcggttctggtggtaaatccaaagctgttgaacaggttaaaaacgctttcaacaaactgcaggaaaaaggtatctacaaagctatgtccgaattcgacatcttcatcaactacatcgaagcttacatgaccatgaaaatccgtaactag

SEQ ID NO: 825 - DNA, 711 bp, synthetic construct; identical to SEQ ID NO: 496
  misc_feature 1..711: note = Synthetic
  source 1..711: mol_type = other DNA

SEQ ID NO: 826 - DNA, 1260 bp, synthetic construct; identical to SEQ ID NO: 538
  misc_feature 1..1260: note = Synthetic
  source 1..1260: mol_type = other DNA

SEQ ID NO: 827 - DNA, 1926 bp, synthetic construct
  misc_feature 1..1926: note = Synthetic
  source 1..1926: mol_type = other DNA
atggacatgagggtgcccgctcagctcctggggctcctgctgctgtggctgagaggtgcgcgctgtgaggtgcagctgttggagtctgggggaggcttggtacagcctggggggtccctgagactctcctgtgcagcctctggattcacctttagcagctatgccatgacctgggtccgccaggctccagggagggggctgcagtgggtgtcaactattagtggtagtggtagtaacacatactacgcagactccgtgaagggccggttcaccatctccagagacaattccaagaacacgctgtatctgcaaatgagcagcctgagagccgaggacacggccgtatattactgtgcgaaagaggggggcagtaaccgatacttccaccactggggccagggcaccctggtcaccatctcctcagcctccaccaagggcccatcggtcttccccctggcaccctcctccaagagcacctctgggggcacagcggccctgggctgcctggtcaaggactacttccccgaaccggtgacggtgtcgtggaactcaggcgccctgaccagcggcgtgcacaccttcccggctgtcctacagtcctcaggactctactccctcagcagcgtggtgaccgtgccctccagcagcttgggcacccagacctacatctgcaacgtgaatcacaagcccagcaacaccaaggtggacaagaaagttgagcccaaatcttgtgacaaaactcacacatgcccaccgtgcccagcacctgaactcctggggggaccgtcagtcttcctcttccccccaaaacccaaggacaccctcatgatctcccggacccctgaggtcacatgcgtggtggtggacgtgagccacgaagaccctgaggtcaagttcaactggtacgtggacggcgtggaggtgcataatgccaagacaaagccgtgcgaggagcagtacggcagcacgtaccgttgcgtcagcgtcctcaccgtcctgcaccaggactggctgaatggcaaggagtacaagtgcaaggtgtccaacaaagccctcccagcccccatcgagaaaaccatctccaaagccaaagggcagccccgagaaccacaggtgtacaccctgcccccatcccggaaggagatgaccaagaaccaggtcagcctgacctgcctggtcaaaggcttctatcccagcgacatcgccgtggagtgggagagcaatgggcagccggagaacaactacaagaccacgcctcccgtgctgaagtccgacggctccttcttcctctatagcaagctcaccgtggacaagagcaggtggcagcaggggaacgtcttctcatgctccgtgatgcatgaggctctgcacaaccactacacgcagaagagcctctccctgtctcccgggggaggcggtggatcctctccaggtcaaggtactcaatccgaaaactcctgcacccacttcccgggtaacctgccgaacatgctgcgtgacctgcgtgacgctttctcccgtgttaaaaccttcttccggatgaaagaccagctggacaacctgctgctgaaagaatccctgctggaagacttcaaaggttacctgggttgtcaggctctgtccgaaatgatccagttctacctggaagaagttatgccgcaggctgaaaaccaggacccggacatcaaagctcacgttaactccctgggtgaaaacctgaaaaccctgcgtctgcgtctgcgccgttgccatcgattcctgccgtgcgaaaacggtggcggttctggtggtaaatccaaagctgttgaacaggttaaaaacgctttcaacaaactgcaggaaaaaggtatctacaaagctatgtccgaattcgacatcttcatcaactacatcgaagcttacatgaccatgaaaatccgtaactag

SEQ ID NO: 828 - DNA, 711 bp, synthetic construct; identical to SEQ ID NO: 496
  misc_feature 1..711: note = Synthetic
  source 1..711: mol_type = other DNA

SEQ ID NO: 829 - DNA, 1260 bp, synthetic construct; identical to SEQ ID NO: 541
  misc_feature 1..1260: note = Synthetic
  source 1..1260: mol_type = other DNA

SEQ ID NO: 830 - DNA, 1926 bp, synthetic construct
  misc_feature 1..1926: note = Synthetic
  source 1..1926: mol_type = other DNA
atggacatgagggtgcccgctcagctcctggggctcctgctgctgtggctgagaggtgcgcgctgtgaggtgcagctgttggagtctgggggaggcttggtacagcctggggggtccctgagactctcctgtgcagcctctggattcacctttagcagctatgccatgacctgggtccgccaggctccagggagggggctgcagtgggtgtcaactattagtggtagtggtagtaacacatactacgcagactccgtgaagggccggttcaccatctccagagacaattccaagaacacgctgtatctgcaaatgagcagcctgagagccgaggacacggccgtatattactgtgcgaaagaggggggcagtaaccgatacttccaccactggggccagggcaccctggtcaccatctcctcagcctccaccaagggcccatcggtcttccccctggcaccctcctccaagagcacctctgggggcacagcggccctgggctgcctggtcaaggactacttccccgaaccggtgacggtgtcgtggaactcaggcgccctgaccagcggcgtgcacaccttcccggctgtcctacagtcctcaggactctactccctcagcagcgtggtgaccgtgccctccagcagcttgggcacccagacctacatctgcaacgtgaatcacaagcccagcaacaccaaggtggacaagaaagttgagcccaaatcttgtgacaaaactcacacatgcccaccgtgcccagcacctgaactcctggggggaccgtcagtcttcctcttccccccaaaacccaaggacaccctcatgatctcccggacccctgaggtcacatgcgtggtggtggacgtgagccacgaagaccctgaggtcaagttcaactggtacgtggacggcgtggaggtgcataatgccaagacaaagccgtgcgaggagcagtacggcagcacgtaccgttgcgtcagcgtcctcaccgtcctgcaccaggactggctgaatggcaaggagtacaagtgcaaggtgtccaacaaagccctcccagcccccatcgagaaaaccatctccaaagccaaagggcagccccgagaaccacaggtgtacaccctgcccccatcccggaaggagatgaccaagaaccaggtcagcctgacctgcctggtcaaaggcttctatcccagcgacatcgccgtggagtgggagagcaatgggcagccggagaacaactacaagaccacgcctcccgtgctgaagtccgacggctccttcttcctctatagcaagctcaccgtggacaagagcaggtggcagcaggggaacgtcttctcatgctccgtgatgcatgaggctctgcacaaccactacacgcagaagagcctctccctgtctcccgggggaggcggtggatcctctccaggtcaaggtactcaatccgaaaactcctgcacccacttcccgggtaacctgccgaacatgctgcgtgacctgcgtgacgctttctcccgtgttaaaaccttcttccagatgaaagaccagctggacaacaagctgctgaaagaatccctgctggaagacttcaaaggttacctgggttgtcaggctctgtccgaaatgatccagttctacctggaagaagttatgccgcaggctgaaaaccaggacccggacatcaaagctcacgttaactccctgggtgaaaacctgaaaaccctgcgtctgcgtctgcgccgttgccatcgattcctgccgtgcgaaaacggtggcggttctggtggtaaatccaaagctgttgaacaggttaaaaacgctttcaacaaactgcaggaaaaaggtatctacaaagctatgtccgaattcgacatcttcatcaactacatcgaagcttacatgaccatgaaaatccgtaactag

SEQ ID NO: 831 - DNA, 711 bp, synthetic construct; identical to SEQ ID NO: 496
  misc_feature 1..711: note = Synthetic
  source 1..711: mol_type = other DNA

SEQ ID NO: 832 - DNA, 1260 bp, synthetic construct; identical to SEQ ID NO: 544
  misc_feature 1..1260: note = Synthetic
  source 1..1260: mol_type = other DNA

SEQ ID NO: 833 - DNA, 1926 bp, synthetic construct
  misc_feature 1..1926: note = Synthetic
  source 1..1926: mol_type = other DNA
atggacatgagggtgcccgctcagctcctggggctcctgctgctgtggctgagaggtgcgcgctgtgaggtgcagctgttggagtctgggggaggcttggtacagcctggggggtccctgagactctcctgtgcagcctctggattcacctttagcagctatgccatgacctgggtccgccaggctccagggagggggctgcagtgggtgtcaactattagtggtagtggtagtaacacatactacgcagactccgtgaagggccggttcaccatctccagagacaattccaagaacacgctgtatctgcaaatgagcagcctgagagccgaggacacggccgtatattactgtgcgaaagaggggggcagtaaccgatacttccaccactggggccagggcaccctggtcaccatctcctcagcctccaccaagggcccatcggtcttccccctggcaccctcctccaagagcacctctgggggcacagcggccctgggctgcctggtcaaggactacttccccgaaccggtgacggtgtcgtggaactcaggcgccctgaccagcggcgtgcacaccttcccggctgtcctacagtcctcaggactctactccctcagcagcgtggtgaccgtgccctccagcagcttgggcacccagacctacatctgcaacgtgaatcacaagcccagcaacaccaaggtggacaagaaagttgagcccaaatcttgtgacaaaactcacacatgcccaccgtgcccagcacctgaactcctggggggaccgtcagtcttcctcttccccccaaaacccaaggacaccctcatgatctcccggacccctgaggtcacatgcgtggtggtggacgtgagccacgaagaccctgaggtcaagttcaactggtacgtggacggcgtggaggtgcataatgccaagacaaagccgtgcgaggagcagtacggcagcacgtaccgttgcgtcagcgtcctcaccgtcctgcaccaggactggctgaatggcaaggagtacaagtgcaaggtgtccaacaaagccctcccagcccccatcgagaaaaccatctccaaagccaaagggcagccccgagaaccacaggtgtacaccctgcccccatcccggaaggagatgaccaagaaccaggtcagcctgacctgcctggtcaaaggcttctatcccagcgacatcgccgtggagtgggagagcaatgggcagccggagaacaactacaagaccacgcctcccgtgctgaagtccgacggctccttcttcctctatagcaagctcaccgtggacaagagcaggtggcagcaggggaacgtcttctcatgctccgtgatgcatgaggctctgcacaaccactacacgcagaagagcctctccctgtctcccgggggaggcggtggatcctctccaggtcaaggtactcaatccgaaaactcctgcacccacttcccgggtaacctgccgaacatgctgcgtgacctgcgtgacgctttctcccgtgttgacaccttcttccagatgaaagaccagctggacaacctgctgctgaaagaatccctgctggaagacttcaaaggttacctgggttgtcaggctctgtccgaaatgatccagttctacctggaagaagttatgccgcaggctgaaaaccaggacccggacatcaaagctcacgttaactccctgggtgaaaacctgaaaaccctgcgtctgcgtctgcgccgttgccatcgattcctgccgtgcgaaaacggtggcggttctggtggtaaatccaaagctgttgaacaggttaaaaacgctttcaacaaactgcaggaaaaaggtatctacaaagctatgtccgaattcgacatcttcatcaactacatcgaagcttacatgaccatgaaaatccgtaactag

SEQ ID NO: 834 - DNA, 711 bp, synthetic construct; identical to SEQ ID NO: 496
  misc_feature 1..711: note = Synthetic
  source 1..711: mol_type = other DNA

SEQ ID NO: 835 - DNA, 1260 bp, synthetic construct; identical to SEQ ID NO: 547
  misc_feature 1..1260: note = Synthetic
  source 1..1260: mol_type = other DNA

SEQ ID NO: 836 - DNA, 1926 bp, synthetic construct
  misc_feature 1..1926: note = Synthetic
  source 1..1926: mol_type = other DNA
atggacatgagggtgcccgctcagctcctggggctcctgctgctgtggctgagaggtgcgcgctgtgaggtgcagctgttggagtctgggggaggcttggtacagcctggggggtccctgagactctcctgtgcagcctctggattcacctttagcagctatgccatgacctgggtccgccaggctccagggagggggctgcagtgggtgtcaactattagtggtagtggtagtaacacatactacgcagactccgtgaagggccggttcaccatctccagagacaattccaagaacacgctgtatctgcaaatgagcagcctgagagccgaggacacggccgtatattactgtgcgaaagaggggggcagtaaccgatacttccaccactggggccagggcaccctggtcaccatctcctcagcctccaccaagggcccatcggtcttccccctggcaccctcctccaagagcacctctgggggcacagcggccctgggctgcctggtcaaggactacttccccgaaccggtgacggtgtcgtggaactcaggcgccctgaccagcggcgtgcacaccttcccggctgtcctacagtcctcaggactctactccctcagcagcgtggtgaccgtgccctccagcagcttgggcacccagacctacatctgcaacgtgaatcacaagcccagcaacaccaaggtggacaagaaagttgagcccaaatcttgtgacaaaactcacacatgcccaccgtgcccagcacctgaactcctggggggaccgtcagtcttcctcttccccccaaaacccaaggacaccctcatgatctcccggacccctgaggtcacatgcgtggtggtggacgtgagccacgaagaccctgaggtcaagttcaactggtacgtggacggcgtggaggtgcataatgccaagacaaagccgtgcgaggagcagtacggcagcacgtaccgttgcgtcagcgtcctcaccgtcctgcaccaggactggctgaatggcaaggagtacaagtgcaaggtgtccaacaaagccctcccagcccccatcgagaaaaccatctccaaagccaaagggcagccccgagaaccacaggtgtacaccctgcccccatcccggaaggagatgaccaagaaccaggtcagcctgacctgcctggtcaaaggcttctatcccagcgacatcgccgtggagtgggagagcaatgggcagccggagaacaactacaagaccacgcctcccgtgctgaagtccgacggctccttcttcctctatagcaagctcaccgtggacaagagcaggtggcagcaggggaacgtcttctcatgctccgtgatgcatgaggctctgcacaaccactacacgcagaagagcctctccctgtctcccgggggaggcggtggatcctctccaggtcaaggtactcaatccgaaaactcctgcacccacttcccgggtaacctgccgaacatgctgcgtgacctgcgtgacgctttctcccgtgttaaaaccttcttcgagatgaaagaccagctggacaacctgctgctgaaagaatccctgctggaagacttcaaaggttacctgggttgtcaggctctgtccgaaatgatccagttctacctggaagaagttatgccgcaggctgaaaaccaggacccggacatcaaagctcacgttaactccctgggtgaaaacctgaaaaccctgcgtctgcgtctgcgccgttgccatcgattcctgccgtgcgaaaacggtggcggttctggtggtaaatccaaagctgttgaacaggttaaaaacgctttcaacaaactgcaggaaaaaggtatctacaaagctatgtccgaattcgacatcttcatcaactacatcgaagcttacatgaccatgaaaatccgtaactag

SEQ ID NO: 837 - DNA, 711 bp, synthetic construct; identical to SEQ ID NO: 496
  misc_feature 1..711: note = Synthetic
  source 1..711: mol_type = other DNA

SEQ ID NO: 838 - DNA, 1260 bp, synthetic construct; identical to SEQ ID NO: 550
  misc_feature 1..1260: note = Synthetic
  source 1..1260: mol_type = other DNA

SEQ ID NO: 839 - DNA, 1935 bp, synthetic construct
  misc_feature 1..1935: note = Synthetic
  source 1..1935: mol_type = other DNA
atggacatgagggtgcccgctcagctcctggggctcctgctgctgtggctgagaggtgcgcgctgtcaggtgcagctggtgcagtctggggctgaggtgaagaagcctggggcctcagtgaaggtgtcctgcaaggcttctggatacaccttcaccagatatgatatcaactgggtgcgacaggccactggacaaggacttgagtggatgggatggatgaaccctaacagtggtaactcaggctctgtacagaagttccggggcagagtcaccatgaccagggacacctccatccacatcgcctacatggaactgagcagcctgagatctgaggacacggccgtgtattactgtgcgagaggcgggtataccagcagctggcggtggtacttcgatctctggggccgtggcaccctggtcactgtctcctcagcctccaccaagggcccatcggtcttccccctggcaccctcctccaagagcacctctgggggcacagcggccctgggctgcctggtcaaggactacttccccgaaccggtgacggtgtcgtggaactcaggcgccctgaccagcggcgtgcacaccttcccggctgtcctacagtcctcaggactctactccctcagcagcgtggtgaccgtgccctccagcagcttgggcacccagacctacatctgcaacgtgaatcacaagcccagcaacaccaaggtggacaagaaagttgagcccaaatcttgtgacaaaactcacacatgcccaccgtgcccagcacctgaactcctggggggaccgtcagtcttcctcttccccccaaaacccaaggacaccctcatgatctcccggacccctgaggtcacatgcgtggtggtggacgtgagccacgaagaccctgaggtcaagttcaactggtacgtggacggcgtggaggtgcataatgccaagacaaagccgtgcgaggagcagtacggcagcacgtaccgttgcgtcagcgtcctcaccgtcctgcaccaggactggctgaatggcaaggagtacaagtgcaaggtgtccaacaaagccctcccagcccccatcgagaaaaccatctccaaagccaaagggcagccccgagaaccacaggtgtacaccctgcccccatcccggaaggagatgaccaagaaccaggtcagcctgacctgcctggtcaaaggcttctatcccagcgacatcgccgtggagtgggagagcaatgggcagccggagaacaactacaagaccacgcctcccgtgctgaagtccgacggctccttcttcctctatagcaagctcaccgtggacaagagcaggtggcagcaggggaacgtcttctcatgctccgtgatgcatgaggctctgcacaaccactacacgcagaagagcctctccctgtctcccgggggaggcggtggatcctctccaggtcaaggtactcaatccgaaaactcctgcacccacttcccgggtaacctgccgaacatgctgcgtgacctgcttgacgctttctcccgtgttaaaaccttcttccagatgaaagaccagctggacaacctgctgctgaaagaatccctgctggaagacttcaaaggttacctgggttgtcaggctctgtccgaaatgatccagttctacctggaagaagttatgccgcaggctgaaaaccaggacccggacatcaaagctcacgttaactccctgggtgaaaacctgaaaaccctgcgtctgcgtctgcgccgttgccatcgattcctgccgtgcgaaaacggtggcggttctggtggtaaatccaaagctgttgaacaggttaaaaacgctttcaacaaactgcaggaaaaaggtatctacaaagctatgtccgaattcgacatcttcatcaactacatcgaagcttacatgaccatgaaaatccgtaactag

SEQ ID NO: 840 - DNA, 711 bp, synthetic construct; identical to SEQ ID NO: 512
  misc_feature 1..711: note = Synthetic
  source 1..711: mol_type = other DNA

SEQ ID NO: 841 - DNA, 1260 bp, synthetic construct; identical to SEQ ID NO: 529
  misc_feature 1..1260: note = Synthetic
  source 1..1260: mol_type = other DNA

SEQ ID NO: 842 - DNA, 1935 bp, synthetic construct
  misc_feature 1..1935: note = Synthetic
  source 1..1935: mol_type = other DNA
atggacatgagggtgcccgctcagctcctggggctcctgctgctgtggctgagaggtgcgcgctgtcaggtgcagctggtgcagtctggggctgaggtgaagaagcctggggcctcagtgaaggtgtcctgcaaggcttctggatacaccttcaccagatatgatatcaactgggtgcgacaggccactggacaaggacttgagtggatgggatggatgaaccctaacagtggtaactcaggctctgtacagaagttccggggcagagtcaccatgaccagggacacctccatccacatcgcctacatggaactgagcagcctgagatctgaggacacggccgtgtattactgtgcgagaggcgggtataccagcagctggcggtggtacttcgatctctggggccgtggcaccctggtcactgtctcctcagcctccaccaagggcccatcggtcttccccctggcaccctcctccaagagcacctctgggggcacagcggccctgggctgcctggtcaaggactacttccccgaaccggtgacggtgtcgtggaactcaggcgccctgaccagcggcgtgcacaccttcccggctgtcctacagtcctcaggactctactccctcagcagcgtggtgaccgtgccctccagcagcttgggcacccagacctacatctgcaacgtgaatcacaagcccagcaacaccaaggtggacaagaaagttgagcccaaatcttgtgacaaaactcacacatgcccaccgtgcccagcacctgaactcctggggggaccgtcagtcttcctcttccccccaaaacccaaggacaccctcatgatctcccggacccctgaggtcacatgcgtggtggtggacgtgagccacgaagaccctgaggtcaagttcaactggtacgtggacggcgtggaggtgcataatgccaagacaaagccgtgcgaggagcagtacggcagcacgtaccgttgcgtcagcgtcctcaccgtcctgcaccaggactggctgaatggcaaggagtacaagtgcaaggtgtccaacaaagccctcccagcccccatcgagaaaaccatctccaaagccaaagggcagccccgagaaccacaggtgtacaccctgcccccatcccggaaggagatgaccaagaaccaggtcagcctgacctgcctggtcaaaggcttctatcccagcgacatcgccgtggagtgggagagcaatgggcagccggagaacaactacaagaccacgcctcccgtgctgaagtccgacggctccttcttcctctatagcaagctcaccgtggacaagagcaggtggcagcaggggaacgtcttctcatgctccgtgatgcatgaggctctgcacaaccactacacgcagaagagcctctccctgtctcccgggggaggcggtggatcctctccaggtcaaggtactcaatccgaaaactcctgcacccacttcccgggtaacctgccgaacatgctgcgtgacctgcgtgacgctttctcccgtgttaaaaccttcttccagatgaaagaccagctggacaacctgctgctgaaagaatccctgctggaagacttcaaaggttacctgggttgtcaggctctgtccgaaatgatccagttctacctggaagaagttatgccgcaggctgaaaaccaggacccggacatcaaagctcacgttaactccctgggtgaaaacctgaaaaccctgcgtctgcgtctgcgccgttgccatcgattcctgccgtgcgaaaacggtggcggttctggtggtaaatccaaagctgttgaacaggttaaaaacgctttcaacaaactgcaggaaaaaggtatctacttagctatgtccgaattcgacatcttcatcaactacatcgaagcttacatgaccatgaaaatccgtaactag

SEQ ID NO: 843 - DNA, 711 bp, synthetic construct; identical to SEQ ID NO: 512
  misc_feature 1..711: note = Synthetic
  source 1..711: mol_type = other DNA

SEQ ID NO: 844 - DNA, 1260 bp, synthetic construct; identical to SEQ ID NO: 532
  misc_feature 1..1260: note = Synthetic
  source 1..1260: mol_type = other DNA

SEQ ID NO: 845 - DNA, 1935 bp, synthetic construct
  misc_feature 1..1935: note = Synthetic
  source 1..1935: mol_type = other DNA
atggacatgagggtgcccgctcagctcctggggctcctgctgctgtggctgagaggtgcgcgctgtcaggtgcagctggtgcagtctggggctgaggtgaagaagcctggggcctcagtgaaggtgtcctgcaaggcttctggatacaccttcaccagatatgatatcaactgggtgcgacaggccactggacaaggacttgagtggatgggatggatgaaccctaacagtggtaactcaggctctgtacagaagttccggggcagagtcaccatgaccagggacacctccatccacatcgcctacatggaactgagcagcctgagatctgaggacacggccgtgtattactgtgcgagaggcgggtataccagcagctggcggtggtacttcgatctctggggccgtggcaccctggtcactgtctcctcagcctccaccaagggcccatcggtcttccccctggcaccctcctccaagagcacctctgggggcacagcggccctgggctgcctggtcaaggactacttccccgaaccggtgacggtgtcgtggaactcaggcgccctgaccagcggcgtgcacaccttcccggctgtcctacagtcctcaggactctactccctcagcagcgtggtgaccgtgccctccagcagcttgggcacccagacctacatctgcaacgtgaatcacaagcccagcaacaccaaggtggacaagaaagttgagcccaaatcttgtgacaaaactcacacatgcccaccgtgcccagcacctgaactcctggggggaccgtcagtcttcctcttccccccaaaacccaaggacaccctcatgatctcccggacccctgaggtcacatgcgtggtggtggacgtgagccacgaagaccctgaggtcaagttcaactggtacgtggacggcgtggaggtgcataatgccaagacaaagccgtgcgaggagcagtacggcagcacgtaccgttgcgtcagcgtcctcaccgtcctgcaccaggactggctgaatggcaaggagtacaagtgcaaggtgtccaacaaagccctcccagcccccatcgagaaaaccatctccaaagccaaagggcagccccgagaaccacaggtgtacaccctgcccccatcccggaaggagatgaccaagaaccaggtcagcctgacctgcctggtcaaaggcttctatcccagcgacatcgccgtggagtgggagagcaatgggcagccggagaacaactacaagaccacgcctcccgtgctgaagtccgacggctccttcttcctctatagcaagctcaccgtggacaagagcaggtggcagcaggggaacgtcttctcatgctccgtgatgcatgaggctctgcacaaccactacacgcagaagagcctctccctgtctcccgggggaggcggtggatcctctccaggtcaaggtactcaatccgaaaactcctgcacccacttcccgggtaacctgccgaacatgctgcgtgacctgcgtgacgctttctcccgtgttaaaaccttcttccagatgaaagaccagctggacaacctgctgctgaaagaatccctgctggaagacttcaaaggttacctgggttgtcaggctctgtccgaaatgatccagttctacctggaagaagttatgccgcaggctgaaaaccaggacccggacatcaaagctcacgttaactccctgggtgaaaacctgaaaaccctgcgtctgcgtctgcgccgttgccatcgattcctgccgtgcgaaaacggtggcggttctggtggtaaatccaaagctgttgaacaggttaaaaacgctttcaacaaactgcaggaaaaaggtatctacgacgctatgtccgaattcgacatcttcatcaactacatcgaagcttacatgaccatgaaaatccgtaactag

SEQ ID NO: 846 - DNA, 711 bp, synthetic construct; identical to SEQ ID NO: 512
  misc_feature 1..711: note = Synthetic
  source 1..711: mol_type = other DNA

SEQ ID NO: 847 - DNA, 1260 bp, synthetic construct; identical to SEQ ID NO: 535
  misc_feature 1..1260: note = Synthetic
  source 1..1260: mol_type = other DNA

SEQ ID NO: 848 - DNA, 1935 bp, synthetic construct
  misc_feature 1..1935: note = Synthetic
  source 1..1935: mol_type = other DNA
atggacatgagggtgcccgctcagctcctggggctcctgctgctgtggctgagaggtgcgcgctgtcaggtgcagctggtgcagtctggggctgaggtgaagaagcctggggcctcagtgaaggtgtcctgcaaggcttctggatacaccttcaccagatatgatatcaactgggtgcgacaggccactggacaaggacttgagtggatgggatggatgaaccctaacagtggtaactcaggctctgtacagaagttccggggcagagtcaccatgaccagggacacctccatccacatcgcctacatggaactgagcagcctgagatctgaggacacggccgtgtattactgtgcgagaggcgggtataccagcagctggcggtggtacttcgatctctggggccgtggcaccctggtcactgtctcctcagcctccaccaagggcccatcggtcttccccctggcaccctcctccaagagcacctctgggggcacagcggccctgggctgcctggtcaaggactacttccccgaaccggtgacggtgtcgtggaactcaggcgccctgaccagcggcgtgcacaccttcccggctgtcctacagtcctcaggactctactccctcagcagcgtggtgaccgtgccctccagcagcttgggcacccagacctacatctgcaacgtgaatcacaagcccagcaacaccaaggtggacaagaaagttgagcccaaatcttgtgacaaaactcacacatgcccaccgtgcccagcacctgaactcctggggggaccgtcagtcttcctcttccccccaaaacccaaggacaccctcatgatctcccggacccctgaggtcacatgcgtggtggtggacgtgagccacgaagaccctgaggtcaagttcaactggtacgtggacggcgtggaggtgcataatgccaagacaaagccgtgcgaggagcagtacggcagcacgtaccgttgcgtcagcgtcctcaccgtcctgcaccaggactggctgaatggcaaggagtacaagtgcaaggtgtccaacaaagccctcccagcccccatcgagaaaaccatctccaaagccaaagggcagccccgagaaccacaggtgtacaccctgcccccatcccggaaggagatgaccaagaaccaggtcagcctgacctgcctggtcaaaggcttctatcccagcgacatcgccgtggagtgggagagcaatgggcagccggagaacaactacaagaccacgcctcccgtgctgaagtccgacggctccttcttcctctatagcaagctcaccgtggacaagagcaggtggcagcaggggaacgtcttctcatgctccgtgatgcatgaggctctgcacaaccactacacgcagaagagcctctccctgtctcccgggggaggcggtggatcctctccaggtcaaggtactcaatccgaaaactcctgcacccacttcccgggtaacctgccgaacatgctgcgtgacctgcgtgacgctttctcccgtgttaaaaccttcttccagatgaaaggccagctggacaacctgctgctgaaagaatccctgctggaagacttcaaaggttacctgggttgtcaggctctgtccgaaatgatccagttctacctggaagaagttatgccgcaggctgaaaaccaggacccggacatcaaagctcacgttaactccctgggtgaaaacctgaaaaccctgcgtctgcgtctgcgccgttgccatcgattcctgccgtgcgaaaacggtggcggttctggtggtaaatccaaagctgttgaacaggttaaaaacgctttcaacaaactgcaggaaaaaggtatctacaaagctatgtccgaattcgacatcttcatcaactacatcgaagcttacatgaccatgaaaatccgtaactag

SEQ ID NO: 849 - DNA, 711 bp, synthetic construct; identical to SEQ ID NO: 512
  misc_feature 1..711: note = Synthetic
  source 1..711: mol_type = other DNA

SEQ ID NO: 850 - DNA, 1260 bp, synthetic construct; identical to SEQ ID NO: 538
  misc_feature 1..1260: note = Synthetic
  source 1..1260: mol_type = other DNA

SEQ ID NO: 851 - DNA, 1935 bp, synthetic construct
  misc_feature 1..1935: note = Synthetic
  source 1..1935: mol_type = other DNA
atggacatgagggtgcccgctcagctcctggggctcctgctgctgtggctgagaggtgcgcgctgtcaggtgcagctggtgcagtctggggctgaggtgaagaagcctggggcctcagtgaaggtgtcctgcaaggcttctggatacaccttcaccagatatgatatcaactgggtgcgacaggccactggacaaggacttgagtggatgggatggatgaaccctaacagtggtaactcaggctctgtacagaagttccggggcagagtcaccatgaccagggacacctccatccacatcgcctacatggaactgagcagcctgagatctgaggacacggccgtgtattactgtgcgagaggcgggtataccagcagctggcggtggtacttcgatctctggggccgtggcaccctggtcactgtctcctcagcctccaccaagggcccatcggtcttccccctggcaccctcctccaagagcacctctgggggcacagcggccctgggctgcctggtcaaggactacttccccgaaccggtgacggtgtcgtggaactcaggcgccctgaccagcggcgtgcacaccttcccggctgtcctacagtcctcaggactctactccctcagcagcgtggtgaccgtgccctccagcagcttgggcacccagacctacatctgcaacgtgaatcacaagcccagcaacaccaaggtggacaagaaagttgagcccaaatcttgtgacaaaactcacacatgcccaccgtgcccagcacctgaactcctggggggaccgtcagtcttcctcttccccccaaaacccaaggacaccctcatgatctcccggacccctgaggtcacatgcgtggtggtggacgtgagccacgaagaccctgaggtcaagttcaactggtacgtggacggcgtggaggtgcataatgccaagacaaagccgtgcgaggagcagtacggcagcacgtaccgttgcgtcagcgtcctcaccgtcctgcaccaggactggctgaatggcaaggagtacaagtgcaaggtgtccaacaaagccctcccagcccccatcgagaaaaccatctccaaagccaaagggcagccccgagaaccacaggtgtacaccctgcccccatcccggaaggagatgaccaagaaccaggtcagcctgacctgcctggtcaaaggcttctatcccagcgacatcgccgtggagtgggagagcaatgggcagccggagaacaactacaagaccacgcctcccgtgctgaagtccgacggctccttcttcctctatagcaagctcaccgtggacaagagcaggtggcagcaggggaacgtcttctcatgctccgtgatgcatgaggctctgcacaaccactacacgcagaagagcctctccctgtctcccgggggaggcggtggatcctctccaggtcaaggtactcaatccgaaaactcctgcacccacttcccgggtaacctgccgaacatgctgcgtgacctgcgtgacgctttctcccgtgttaaaaccttcttccggatgaaagaccagctggacaacctgctgctgaaagaatccctgctggaagacttcaaaggttacctgggttgtcaggctctgtccgaaatgatccagttctacctggaagaagttatgccgcaggctgaaaaccaggacccggacatcaaagctcacgttaactccctgggtgaaaacctgaaaaccctgcgtctgcgtctgcgccgttgccatcgattcctgccgtgcgaaaacggtggcggttctggtggtaaatccaaagctgttgaacaggttaaaaacgctttcaacaaactgcaggaaaaaggtatctacaaagctatgtccgaattcgacatcttcatcaactacatcgaagcttacatgaccatgaaaatccgtaactag

SEQ ID NO: 852 - DNA, 711 bp, synthetic construct; identical to SEQ ID NO: 512
  misc_feature 1..711: note = Synthetic
  source 1..711: mol_type = other DNA

SEQ ID NO: 853 - DNA, 1260 bp, synthetic construct; identical to SEQ ID NO: 541
  misc_feature 1..1260: note = Synthetic
  source 1..1260: mol_type = other DNA

SEQ ID NO: 854 - DNA, 1935 bp, synthetic construct
  misc_feature 1..1935: note = Synthetic
  source 1..1935: mol_type = other DNA
atggacatgagggtgcccgctcagctcctggggctcctgctgctgtggctgagaggtgcgcgctgtcaggtgcagctggtgcagtctggggctgaggtgaagaagcctggggcctcagtgaaggtgtcctgcaaggcttctggatacaccttcaccagatatgatatcaactgggtgcgacaggccactggacaaggacttgagtggatgggatggatgaaccctaacagtggtaactcaggctctgtacagaagttccggggcagagtcaccatgaccagggacacctccatccacatcgcctacatggaactgagcagcctgagatctgaggacacggccgtgtattactgtgcgagaggcgggtataccagcagctggcggtggtacttcgatctctggggccgtggcaccctggtcactgtctcctcagcctccaccaagggcccatcggtcttccccctggcaccctcctccaagagcacctctgggggcacagcggccctgggctgcctggtcaaggactacttccccgaaccggtgacggtgtcgtggaactcaggcgccctgaccagcggcgtgcacaccttcccggctgtcctacagtcctcaggactctactccctcagcagcgtggtgaccgtgccctccagcagcttgggcacccagacctacatctgcaacgtgaatcacaagcccagcaacaccaaggtggacaagaaagttgagcccaaatcttgtgacaaaactcacacatgcccaccgtgcccagcacctgaactcctggggggaccgtcagtcttcctcttccccccaaaacccaaggacaccctcatgatctcccggacccctgaggtcacatgcgtggtggtggacgtgagccacgaagaccctgaggtcaagttcaactggtacgtggacggcgtggaggtgcataatgccaagacaaagccgtgcgaggagcagtacggcagcacgtaccgttgcgtcagcgtcctcaccgtcctgcaccaggactggctgaatggcaaggagtacaagtgcaaggtgtccaacaaagccctcccagcccccatcgagaaaaccatctccaaagccaaagggcagccccgagaaccacaggtgtacaccctgcccccatcccggaaggagatgaccaagaaccaggtcagcctgacctgcctggtcaaaggcttctatcccagcgacatcgccgtggagtgggagagcaatgggcagccggagaacaactacaagaccacgcctcccgtgctgaagtccgacggctccttcttcctctatagcaagctcaccgtggacaagagcaggtggcagcaggggaacgtcttctcatgctccgtgatgcatgaggctctgcacaaccactacacgcagaagagcctctccctgtctcccgggggaggcggtggatcctctccaggtcaaggtactcaatccgaaaactcctgcacccacttcccgggtaacctgccgaacatgctgcgtgacctgcgtgacgctttctcccgtgttaaaaccttcttccagatgaaagaccagctggacaacaagctgctgaaagaatccctgctggaagacttcaaaggttacctgggttgtcaggctctgtccgaaatgatccagttctacctggaagaagttatgccgcaggctgaaaaccaggacccggacatcaaagctcacgttaactccctgggtgaaaacctgaaaaccctgcgtctgcgtctgcgccgttgccatcgattcctgccgtgcgaaaacggtggcggttctggtggtaaatccaaagctgttgaacaggttaaaaacgctttcaacaaactgcaggaaaaaggtatctacaaagctatgtccgaattcgacatcttcatcaactacatcgaagcttacatgaccatgaaaatccgtaactag

SEQ ID NO: 855 - DNA, 711 bp, synthetic construct; identical to SEQ ID NO: 512
  misc_feature 1..711: note = Synthetic
  source 1..711: mol_type = other DNA

SEQ ID NO: 856 - DNA, 1260 bp, synthetic construct; identical to SEQ ID NO: 544
  misc_feature 1..1260: note = Synthetic
  source 1..1260: mol_type = other DNA

SEQ ID NO: 857 - DNA, 1935 bp, synthetic construct
  misc_feature 1..1935: note = Synthetic
  source 1..1935: mol_type = other DNA
atggacatgagggtgcccgctcagctcctggggctcctgctgctgtggctgagaggtgcgcgctgtcaggtgcagctggtgcagtctggggctgaggtgaagaagcctggggcctcagtgaaggtgtcctgcaaggcttctggatacaccttcaccagatatgatatcaactgggtgcgacaggccactggacaaggacttgagtggatgggatggatgaaccctaacagtggtaactcaggctctgtacagaagttccggggcagagtcaccatgaccagggacacctccatccacatcgcctacatggaactgagcagcctgagatctgaggacacggccgtgtattactgtgcgagaggcgggtataccagcagctggcggtggtacttcgatctctggggccgtggcaccctggtcactgtctcctcagcctccaccaagggcccatcggtcttccccctggcaccctcctccaagagcacctctgggggcacagcggccctgggctgcctggtcaaggactacttccccgaaccggtgacggtgtcgtggaactcaggcgccctgaccagcggcgtgcacaccttcccggctgtcctacagtcctcaggactctactccctcagcagcgtggtgaccgtgccctccagcagcttgggcacccagacctacatctgcaacgtgaatcacaagcccagcaacaccaaggtggacaagaaagttgagcccaaatcttgtgacaaaactcacacatgcccaccgtgcccagcacctgaactcctggggggaccgtcagtcttcctcttccccccaaaacccaaggacaccctcatgatctcccggacccctgaggtcacatgcgtggtggtggacgtgagccacgaagaccctgaggtcaagttcaactggtacgtggacggcgtggaggtgcataatgccaagacaaagccgtgcgaggagcagtacggcagcacgtaccgttgcgtcagcgtcctcaccgtcctgcaccaggactggctgaatggcaaggagtacaagtgcaaggtgtccaacaaagccctcccagcccccatcgagaaaaccatctccaaagccaaagggcagccccgagaaccacaggtgtacaccctgcccccatcccggaaggagatgaccaagaaccaggtcagcctgacctgcctggtcaaaggcttctatcccagcgacatcgccgtggagtgggagagcaatgggcagccggagaacaactacaagaccacgcctcccgtgctgaagtccgacggctccttcttcctctatagcaagctcaccgtggacaagagcaggtggcagcaggggaacgtcttctcatgctccgtgatgcatgaggctctgcacaaccactacacgcagaagagcctctccctgtctcccgggggaggcggtggatcctctccaggtcaaggtactcaatccgaaaactcctgcacccacttcccgggtaacctgccgaacatgctgcgtgacctgcgtgacgctttctcccgtgttgacaccttcttccagatgaaagaccagctggacaacctgctgctgaaagaatccctgctggaagacttcaaaggttacctgggttgtcaggctctgtccgaaatgatccagttctacctggaagaagttatgccgcaggctgaaaaccaggacccggacatcaaagctcacgttaactccctgggtgaaaacctgaaaaccctgcgtctgcgtctgcgccgttgccatcgattcctgccgtgcgaaaacggtggcggttctggtggtaaatccaaagctgttgaacaggttaaaaacgctttcaacaaactgcaggaaaaaggtatctacaaagctatgtccgaattcgacatcttcatcaactacatcgaagcttacatgaccatgaaaatccgtaactag

SEQ ID NO: 858 - DNA, 711 bp, synthetic construct; identical to SEQ ID NO: 512
  misc_feature 1..711: note = Synthetic
  source 1..711: mol_type = other DNA

SEQ ID NO: 859 - DNA, 1260 bp, synthetic construct; identical to SEQ ID NO: 547
  misc_feature 1..1260: note = Synthetic
  source 1..1260: mol_type = other DNA

SEQ ID NO: 860 - DNA, 1935 bp, synthetic construct
  misc_feature 1..1935: note = Synthetic
  source 1..1935: mol_type = other DNA
atggacatgagggtgcccgctcagctcctggggctcctgctgctgtggctgagaggtgcgcgctgtcaggtgcagctggtgcagtctggggctgaggtgaagaagcctggggcctcagtgaaggtgtcctgcaaggcttctggatacaccttcaccagatatgatatcaactgggtgcgacaggccactggacaaggacttgagtggatgggatggatgaaccctaacagtggtaactcaggctctgtacagaagttccggggcagagtcaccatgaccagggacacctccatccacatcgcctacatggaactgagcagcctgagatctgaggacacggccgtgtattactgtgcgagaggcgggtataccagcagctggcggtggtacttcgatctctggggccgtggcaccctggtcactgtctcctcagcctccaccaagggcccatcggtcttccccctggcaccctcctccaagagcacctctgggggcacagcggccctgggctgcctggtcaaggactacttccccgaaccggtgacggtgtcgtggaactcaggcgccctgaccagcggcgtgcacaccttcccggctgtcctacagtcctcaggactctactccctcagcagcgtggtgaccgtgccctccagcagcttgggcacccagacctacatctgcaacgtgaatcacaagcccagcaacaccaaggtggacaagaaagttgagcccaaatcttgtgacaaaactcacacatgcccaccgtgcccagcacctgaactcctggggggaccgtcagtcttcctcttccccccaaaacccaaggacaccctcatgatctcccggacccctgaggtcacatgcgtggtggtggacgtgagccacgaagaccctgaggtcaagttcaactggtacgtggacggcgtggaggtgcataatgccaagacaaagccgtgcgaggagcagtacggcagcacgtaccgttgcgtcagcgtcctcaccgtcctgcaccaggactggctgaatggcaaggagtacaagtgcaaggtgtccaacaaagccctcccagcccccatcgagaaaaccatctccaaagccaaagggcagccccgagaaccacaggtgtacaccctgcccccatcccggaaggagatgaccaagaaccaggtcagcctgacctgcctggtcaaaggcttctatcccagcgacatcgccgtggagtgggagagcaatgggcagccggagaacaactacaagaccacgcctcccgtgctgaagtccgacggctccttcttcctctatagcaagctcaccgtggacaagagcaggtggcagcaggggaacgtcttctcatgctccgtgatgcatgaggctctgcacaaccactacacgcagaagagcctctccctgtctcccgggggaggcggtggatcctctccaggtcaaggtactcaatccgaaaactcctgcacccacttcccgggtaacctgccgaacatgctgcgtgacctgcgtgacgctttctcccgtgttaaaaccttcttcgagatgaaagaccagctggacaacctgctgctgaaagaatccctgctggaagacttcaaaggttacctgggttgtcaggctctgtccgaaatgatccagttctacctggaagaagttatgccgcaggctgaaaaccaggacccggacatcaaagctcacgttaactccctgggtgaaaacctgaaaaccctgcgtctgcgtctgcgccgttgccatcgattcctgccgtgcgaaaacggtggcggttctggtggtaaatccaaagctgttgaacaggttaaaaacgctttcaacaaactgcaggaaaaaggtatctacaaagctatgtccgaattcgacatcttcatcaactacatcgaagcttacatgaccatgaaaatccgtaactag

SEQ ID NO: 861 - DNA, 711 bp, synthetic construct; identical to SEQ ID NO: 512
  misc_feature 1..711: note = Synthetic
  source 1..711: mol_type = other DNA

SEQ ID NO: 862 - DNA, 1260 bp, synthetic construct; identical to SEQ ID NO: 550
  misc_feature 1..1260: note = Synthetic
  source 1..1260: mol_type = other DNA

SEQ ID NO: 863 - protein, 641 aa, synthetic construct
  REGION 1..641: note = Synthetic
MDMRVPAQLLGLLLLWLRGARCEVQVLESGGGLVQPGESLRLSCTASGFTFNAYAMSWVRQAPGKGLEWVSTISGSGSTTYYADSVKGRFTISRDNSKNTLDLQMNSLRAADTAVYYCAKVAGSNFFFDHWGQGTLVTVSSASTKGPSVFPLAPSSKSTSGGTAALGCLVKDYFPEPVTVSWNSGALTSGVHTFPAVLQSSGLYSLSSVVTVPSSSLGTQTYICNVNHKPSNTKVDKKVEPKSCDKTHTCPPCPAPELLGGPSVFLFPPKPKDTLMISRTPEVTCVVVDVSHEDPEVKFNWYVDGVEVHNAKTKPCEEQYGSTYRCVSVLTVLHQDWLNGKEYKCKVSNKALPAPIEKTISKAKGQPREPQVYTLPPSREEMTKNQVSLTCLVKGFYPSDIAVEWESNGQPENNYKTTPPVLDSDGSFFLYSKLTVDKSRWQQGNVFSCSVMHEALHNHYTQKSLSLSPGGGGGSSPGQGTQSENSCTHFPGNLPNMLRDLLDAFSRVKTFFQMKDQLDNLLLKESLLEDFKGYLGCQALSEMIQFYLEEVMPQAENQDPDIKAHVNSLGENLKTLRLRLRRCHRFLPCENGGGSGGKSKAVEQVKNAFNKLQEKGIYKAMSEFDIFINYIEAYMTMKIRN

SEQ ID NO: 864 - protein, 237 aa, synthetic construct
  REGION 1..237: note = Synthetic
MDMRVPAQLLGLLLLWLRGARCEIVMTQSPATLSVSPGERATLSCRASQSINSNLAWYQQKPGQAPRLLIYGAYTRATGIPDRFSGSGSGTEFTLTISSLQSEDFAVYYCQEFIMWPPWTFGQGTKVEIKRTVAAPSVFIFPPSDEQLKSGTASVVCLLNNFYPREAKVQWKVDNALQSGNSQESVTEQDSKDSTYSLSSTLTLSKADYEKHKVYACEVTHQGLSSPVTKSFNRGEC

SEQ ID NO: 865 - protein, 641 aa, synthetic construct
  REGION 1..641: note = Synthetic
MDMRVPAQLLGLLLLWLRGARCEVQVLESGGGLVQPGESLRLSCTASGFTFNAYAMSWVRQAPGKGLEWVSTISGSGSTTYYADSVKGRFTISRDNSKNTLDLQMNSLRAADTAVYYCAKVAGSNFFFDHWGQGTLVTVSSASTKGPSVFPLAPSSKSTSGGTAALGCLVKDYFPEPVTVSWNSGALTSGVHTFPAVLQSSGLYSLSSVVTVPSSSLGTQTYICNVNHKPSNTKVDKKVEPKSCDKTHTCPPCPAPELLGGPSVFLFPPKPKDTLMISRTPEVTCVVVDVSHEDPEVKFNWYVDGVEVHNAKTKPCEEQYGSTYRCVSVLTVLHQDWLNGKEYKCKVSNKALPAPIEKTISKAKGQPREPQVYTLPPSREEMTKNQVSLTCLVKGFYPSDIAVEWESNGQPENNYKTTPPVLDSDGSFFLYSKLTVDKSRWQQGNVFSCSVMHEALHNHYTQKSLSLSPGGGGGSSPGQGTQSENSCTHFPGNLPNMLRDLRDAFSRVKTFFQMKDQLDNLLLKESLLEDFKGYLGCQALSEMIQFYLEEVMPQAENQDPDIKAHVNSLGENLKTLRLRLRRCHRFLPCENGGGSGGKSKAVEQVKNAFNKLQEKGIYLAMSEFDIFINYIEAYMTMKIRN

SEQ ID NO: 866 - protein, 237 aa, synthetic construct; identical to SEQ ID NO: 864
  REGION 1..237: note = Synthetic

SEQ ID NO: 867 - protein, 641 aa, synthetic construct
  REGION 1..641: note = Synthetic
MDMRVPAQLLGLLLLWLRGARCEVQVLESGGGLVQPGESLRLSCTASGFTFNAYAMSWVRQAPGKGLEWVSTISGSGSTTYYADSVKGRFTISRDNSKNTLDLQMNSLRAADTAVYYCAKVAGSNFFFDHWGQGTLVTVSSASTKGPSVFPLAPSSKSTSGGTAALGCLVKDYFPEPVTVSWNSGALTSGVHTFPAVLQSSGLYSLSSVVTVPSSSLGTQTYICNVNHKPSNTKVDKKVEPKSCDKTHTCPPCPAPELLGGPSVFLFPPKPKDTLMISRTPEVTCVVVDVSHEDPEVKFNWYVDGVEVHNAKTKPCEEQYGSTYRCVSVLTVLHQDWLNGKEYKCKVSNKALPAPIEKTISKAKGQPREPQVYTLPPSREEMTKNQVSLTCLVKGFYPSDIAVEWESNGQPENNYKTTPPVLDSDGSFFLYSKLTVDKSRWQQGNVFSCSVMHEALHNHYTQKSLSLSPGGGGGSSPGQGTQSENSCTHFPGNLPNMLRDLRDAFSRVKTFFQMKDQLDNLLLKESLLEDFKGYLGCQALSEMIQFYLEEVMPQAENQDPDIKAHVNSLGENLKTLRLRLRRCHRFLPCENGGGSGGKSKAVEQVKNAFNKLQEKGIYDAMSEFDIFINYIEAYMTMKIRN

SEQ ID NO: 868 - protein, 237 aa, synthetic construct; identical to SEQ ID NO: 864
  REGION 1..237: note = Synthetic

SEQ ID NO: 869 - protein, 641 aa, synthetic construct
  REGION 1..641: note = Synthetic
MDMRVPAQLLGLLLLWLRGARCEVQVLESGGGLVQPGESLRLSCTASGFTFNAYAMSWVRQAPGKGLEWVSTISGSGSTTYYADSVKGRFTISRDNSKNTLDLQMNSLRAADTAVYYCAKVAGSNFFFDHWGQGTLVTVSSASTKGPSVFPLAPSSKSTSGGTAALGCLVKDYFPEPVTVSWNSGALTSGVHTFPAVLQSSGLYSLSSVVTVPSSSLGTQTYICNVNHKPSNTKVDKKVEPKSCDKTHTCPPCPAPELLGGPSVFLFPPKPKDTLMISRTPEVTCVVVDVSHEDPEVKFNWYVDGVEVHNAKTKPCEEQYGSTYRCVSVLTVLHQDWLNGKEYKCKVSNKALPAPIEKTISKAKGQPREPQVYTLPPSREEMTKNQVSLTCLVKGFYPSDIAVEWESNGQPENNYKTTPPVLDSDGSFFLYSKLTVDKSRWQQGNVFSCSVMHEALHNHYTQKSLSLSPGGGGGSSPGQGTQSENSCTHFPGNLPNMLRDLRDAFSRVKTFFQMKGQLDNLLLKESLLEDFKGYLGCQALSEMIQFYLEEVMPQAENQDPDIKAHVNSLGENLKTLRLRLRRCHRFLPCENGGGSGGKSKAVEQVKNAFNKLQEKGIYKAMSEFDIFINYIEAYMTMKIRN

SEQ ID NO: 870 - protein, 237 aa, synthetic construct; identical to SEQ ID NO: 864
  REGION 1..237: note = Synthetic

SEQ ID NO: 871 - protein, 641 aa, synthetic construct
  REGION 1..641: note = Synthetic
MDMRVPAQLLGLLLLWLRGARCEVQVLESGGGLVQPGESLRLSCTASGFTFNAYAMSWVRQAPGKGLEWVSTISGSGSTTYYADSVKGRFTISRDNSKNTLDLQMNSLRAADTAVYYCAKVAGSNFFFDHWGQGTLVTVSSASTKGPSVFPLAPSSKSTSGGTAALGCLVKDYFPEPVTVSWNSGALTSGVHTFPAVLQSSGLYSLSSVVTVPSSSLGTQTYICNVNHKPSNTKVDKKVEPKSCDKTHTCPPCPAPELLGGPSVFLFPPKPKDTLMISRTPEVTCVVVDVSHEDPEVKFNWYVDGVEVHNAKTKPCEEQYGSTYRCVSVLTVLHQDWLNGKEYKCKVSNKALPAPIEKTISKAKGQPREPQVYTLPPSREEMTKNQVSLTCLVKGFYPSDIAVEWESNGQPENNYKTTPPVLDSDGSFFLYSKLTVDKSRWQQGNVFSCSVMHEALHNHYTQKSLSLSPGGGGGSSPGQGTQSENSCTHFPGNLPNMLRDLRDAFSRVKTFFRMKDQLDNLLLKESLLEDFKGYLGCQALSEMIQFYLEEVMPQAENQDPDIKAHVNSLGENLKTLRLRLRRCHRFLPCENGGGSGGKSKAVEQVKNAFNKLQEKGIYKAMSEFDIFINYIEAYMTMKIRN

SEQ ID NO: 872 - protein, 237 aa, synthetic construct; identical to SEQ ID NO: 864
  REGION 1..237: note = Synthetic

SEQ ID NO: 873 - protein, 641 aa, synthetic construct
  REGION 1..641: note = Synthetic
MDMRVPAQLLGLLLLWLRGARCEVQVLESGGGLVQPGESLRLSCTASGFTFNAYAMSWVRQAPGKGLEWVSTISGSGSTTYYADSVKGRFTISRDNSKNTLDLQMNSLRAADTAVYYCAKVAGSNFFFDHWGQGTLVTVSSASTKGPSVFPLAPSSKSTSGGTAALGCLVKDYFPEPVTVSWNSGALTSGVHTFPAVLQSSGLYSLSSVVTVPSSSLGTQTYICNVNHKPSNTKVDKKVEPKSCDKTHTCPPCPAPELLGGPSVFLFPPKPKDTLMISRTPEVTCVVVDVSHEDPEVKFNWYVDGVEVHNAKTKPCEEQYGSTYRCVSVLTVLHQDWLNGKEYKCKVSNKALPAPIEKTISKAKGQPREPQVYTLPPSREEMTKNQVSLTCLVKGFYPSDIAVEWESNGQPENNYKTTPPVLDSDGSFFLYSKLTVDKSRWQQGNVFSCSVMHEALHNHYTQKSLSLSPGGGGGSSPGQGTQSENSCTHFPGNLPNMLRDLRDAFSRVKTFFQMKDQLDNKLLKESLLEDFKGYLGCQALSEMIQFYLEEVMPQAENQDPDIKAHVNSLGENLKTLRLRLRRCHRFLPCENGGGSGGKSKAVEQVKNAFNKLQEKGIYKAMSEFDIFINYIEAYMTMKIRN

SEQ ID NO: 874 - protein, 237 aa, synthetic construct; identical to SEQ ID NO: 864
  REGION 1..237: note = Synthetic

SEQ ID NO: 875 - protein, 641 aa, synthetic construct
  REGION 1..641: note = Synthetic
MDMRVPAQLLGLLLLWLRGARCEVQVLESGGGLVQPGESLRLSCTASGFTFNAYAMSWVRQAPGKGLEWVSTISGSGSTTYYADSVKGRFTISRDNSKNTLDLQMNSLRAADTAVYYCAKVAGSNFFFDHWGQGTLVTVSSASTKGPSVFPLAPSSKSTSGGTAALGCLVKDYFPEPVTVSWNSGALTSGVHTFPAVLQSSGLYSLSSVVTVPSSSLGTQTYICNVNHKPSNTKVDKKVEPKSCDKTHTCPPCPAPELLGGPSVFLFPPKPKDTLMISRTPEVTCVVVDVSHEDPEVKFNWYVDGVEVHNAKTKPCEEQYGSTYRCVSVLTVLHQDWLNGKEYKCKVSNKALPAPIEKTISKAKGQPREPQVYTLPPSREEMTKNQVSLTCLVKGFYPSDIAVEWESNGQPENNYKTTPPVLDSDGSFFLYSKLTVDKSRWQQGNVFSCSVMHEALHNHYTQKSLSLSPGGGGGSSPGQGTQSENSCTHFPGNLPNMLRDLRDAFSRVDTFFQMKDQLDNLLLKESLLEDFKGYLGCQALSEMIQFYLEEVMPQAENQDPDIKAHVNSLGENLKTLRLRLRRCHRFLPCENGGGSGGKSKAVEQVKNAFNKLQEKGIYKAMSEFDIFINYIEAYMTMKIRN

SEQ ID NO: 876 - protein, 237 aa, synthetic construct; identical to SEQ ID NO: 864
  REGION 1..237: note = Synthetic

SEQ ID NO: 877 - protein, 641 aa, synthetic construct
  REGION 1..641: note = Synthetic
MDMRVPAQLLGLLLLWLRGARCEVQVLESGGGLVQPGESLRLSCTASGFTFNAYAMSWVRQAPGKGLEWVSTISGSGSTTYYADSVKGRFTISRDNSKNTLDLQMNSLRAADTAVYYCAKVAGSNFFFDHWGQGTLVTVSSASTKGPSVFPLAPSSKSTSGGTAALGCLVKDYFPEPVTVSWNSGALTSGVHTFPAVLQSSGLYSLSSVVTVPSSSLGTQTYICNVNHKPSNTKVDKKVEPKSCDKTHTCPPCPAPELLGGPSVFLFPPKPKDTLMISRTPEVTCVVVDVSHEDPEVKFNWYVDGVEVHNAKTKPCEEQYGSTYRCVSVLTVLHQDWLNGKEYKCKVSNKALPAPIEKTISKAKGQPREPQVYTLPPSREEMTKNQVSLTCLVKGFYPSDIAVEWESNGQPENNYKTTPPVLDSDGSFFLYSKLTVDKSRWQQGNVFSCSVMHEALHNHYTQKSLSLSPGGGGGSSPGQGTQSENSCTHFPGNLPNMLRDLRDAFSRVKTFFEMKDQLDNLLLKESLLEDFKGYLGCQALSEMIQFYLEEVMPQAENQDPDIKAHVNSLGENLKTLRLRLRRCHRFLPCENGGGSGGKSKAVEQVKNAFNKLQEKGIYKAMSEFDIFINYIEAYMTMKIRN

SEQ ID NO: 878 - protein, 237 aa, synthetic construct; identical to SEQ ID NO: 864
  REGION 1..237: note = Synthetic

SEQ ID NO: 879 - protein, 641 aa, synthetic construct
  REGION 1..641: note = Synthetic
MDMRVPAQLLGLLLLWLRGARCEVQLLESGGGLVQPGGSLRLSCAASGFTFSTYAMNWVRQAPGKGLEWVSTVSGSGRPTYYADSVKGRFTISRDNSKNTLYLQMNSLRAEDTAVYYCAKAYYSNYLFDYWGQGTLVTVSSASTKGPSVFPLAPSSKSTSGGTAALGCLVKDYFPEPVTVSWNSGALTSGVHTFPAVLQSSGLYSLSSVVTVPSSSLGTQTYICNVNHKPSNTKVDKKVEPKSCDKTHTCPPCPAPELLGGPSVFLFPPKPKDTLMISRTPEVTCVVVDVSHEDPEVKFNWYVDGVEVHNAKTKPCEEQYGSTYRCVSVLTVLHQDWLNGKEYKCKVSNKALPAPIEKTISKAKGQPREPQVYTLPPSREEMTKNQVSLTCLVKGFYPSDIAVEWESNGQPENNYKTTPPVLDSDGSFFLYSKLTVDKSRWQQGNVFSCSVMHEALHNHYTQKSLSLSPGGGGGSSPGQGTQSENSCTHFPGNLPNMLRDLLDAFSRVKTFFQMKDQLDNLLLKESLLEDFKGYLGCQALSEMIQFYLEEVMPQAENQDPDIKAHVNSLGENLKTLRLRLRRCHRFLPCENGGGSGGKSKAVEQVKNAFNKLQEKGIYKAMSEFDIFINYIEAYMTMKIRN

SEQ ID NO: 880 - protein, 237 aa, synthetic construct
  REGION 1..237: note = Synthetic
MDMRVPAQLLGLLLLWLRGARCEIVMTQSPAILSVSPGERATLSCRASQSVSSNLAWYQQKPGQAPRLLIYGASTRATGVPARFSGGGSGTDFTLTISSLQSEDFAVYYCQHFKTWPPLTFGGGTKVEIKRTVAAPSVFIFPPSDEQLKSGTASVVCLLNNFYPREAKVQWKVDNALQSGNSQESVTEQDSKDSTYSLSSTLTLSKADYEKHKVYACEVTHQGLSSPVTKSFNRGEC

SEQ ID NO: 881 - protein, 641 aa, synthetic construct
  REGION 1..641: note = Synthetic
MDMRVPAQLLGLLLLWLRGARCEVQLLESGGGLVQPGGSLRLSCAASGFTFSTYAMNWVRQAPGKGLEWVSTVSGSGRPTYYADSVKGRFTISRDNSKNTLYLQMNSLRAEDTAVYYCAKAYYSNYLFDYWGQGTLVTVSSASTKGPSVFPLAPSSKSTSGGTAALGCLVKDYFPEPVTVSWNSGALTSGVHTFPAVLQSSGLYSLSSVVTVPSSSLGTQTYICNVNHKPSNTKVDKKVEPKSCDKTHTCPPCPAPELLGGPSVFLFPPKPKDTLMISRTPEVTCVVVDVSHEDPEVKFNWYVDGVEVHNAKTKPCEEQYGSTYRCVSVLTVLHQDWLNGKEYKCKVSNKALPAPIEKTISKAKGQPREPQVYTLPPSREEMTKNQVSLTCLVKGFYPSDIAVEWESNGQPENNYKTTPPVLDSDGSFFLYSKLTVDKSRWQQGNVFSCSVMHEALHNHYTQKSLSLSPGGGGGSSPGQGTQSENSCTHFPGNLPNMLRDLRDAFSRVKTFFQMKDQLDNLLLKESLLEDFKGYLGCQALSEMIQFYLEEVMPQAENQDPDIKAHVNSLGENLKTLRLRLRRCHRFLPCENGGGSGGKSKAVEQVKNAFNKLQEKGIYLAMSEFDIFINYIEAYMTMKIRN

SEQ ID NO: 882 - protein, 237 aa, synthetic construct; identical to SEQ ID NO: 880
  REGION 1..237: note = Synthetic

SEQ ID NO: 883 - protein, 641 aa, synthetic construct
  REGION 1..641: note = Synthetic
MDMRVPAQLLGLLLLWLRGARCEVQLLESGGGLVQPGGSLRLSCAASGFTFSTYAMNWVRQAPGKGLEWVSTVSGSGRPTYYADSVKGRFTISRDNSKNTLYLQMNSLRAEDTAVYYCAKAYYSNYLFDYWGQGTLVTVSSASTKGPSVFPLAPSSKSTSGGTAALGCLVKDYFPEPVTVSWNSGALTSGVHTFPAVLQSSGLYSLSSVVTVPSSSLGTQTYICNVNHKPSNTKVDKKVEPKSCDKTHTCPPCPAPELLGGPSVFLFPPKPKDTLMISRTPEVTCVVVDVSHEDPEVKFNWYVDGVEVHNAKTKPCEEQYGSTYRCVSVLTVLHQDWLNGKEYKCKVSNKALPAPIEKTISKAKGQPREPQVYTLPPSREEMTKNQVSLTCLVKGFYPSDIAVEWESNGQPENNYKTTPPVLDSDGSFFLYSKLTVDKSRWQQGNVFSCSVMHEALHNHYTQKSLSLSPGGGGGSSPGQGTQSENSCTHFPGNLPNMLRDLRDAFSRVKTFFQMKDQLDNLLLKESLLEDFKGYLGCQALSEMIQFYLEEVMPQAENQDPDIKAHVNSLGENLKTLRLRLRRCHRFLPCENGGGSGGKSKAVEQVKNAFNKLQEKGIYDAMSEFDIFINYIEAYMTMKIRN

SEQ ID NO: 884 - protein, 237 aa, synthetic construct; identical to SEQ ID NO: 880
  REGION 1..237: note = Synthetic

SEQ ID NO: 885 - protein, 641 aa, synthetic construct
  REGION 1..641: note = Synthetic
MDMRVPAQLLGLLLLWLRGARCEVQLLESGGGLVQPGGSLRLSCAASGFTFSTYAMNWVRQAPGKGLEWVSTVSGSGRPTYYADSVKGRFTISRDNSKNTLYLQMNSLRAEDTAVYYCAKAYYSNYLFDYWGQGTLVTVSSASTKGPSVFPLAPSSKSTSGGTAALGCLVKDYFPEPVTVSWNSGALTSGVHTFPAVLQSSGLYSLSSVVTVPSSSLGTQTYICNVNHKPSNTKVDKKVEPKSCDKTHTCPPCPAPELLGGPSVFLFPPKPKDTLMISRTPEVTCVVVDVSHEDPEVKFNWYVDGVEVHNAKTKPCEEQYGSTYRCVSVLTVLHQDWLNGKEYKCKVSNKALPAPIEKTISKAKGQPREPQVYTLPPSREEMTKNQVSLTCLVKGFYPSDIAVEWESNGQPENNYKTTPPVLDSDGSFFLYSKLTVDKSRWQQGNVFSCSVMHEALHNHYTQKSLSLSPGGGGGSSPGQGTQSENSCTHFPGNLPNMLRDLRDAFSRVKTFFQMKGQLDNLLLKESLLEDFKGYLGCQALSEMIQFYLEEVMPQAENQDPDIKAHVNSLGENLKTLRLRLRRCHRFLPCENGGGSGGKSKAVEQVKNAFNKLQEKGIYKAMSEFDIFINYIEAYMTMKIRN

SEQ ID NO: 886 - protein, 237 aa, synthetic construct; identical to SEQ ID NO: 880
  REGION 1..237: note = Synthetic

SEQ ID NO: 887 - protein, 641 aa, synthetic construct
  REGION 1..641: note = Synthetic
MDMRVPAQLLGLLLLWLRGARCEVQLLESGGGLVQPGGSLRLSCAASGFTFSTYAMNWVRQAPGKGLEWVSTVSGSGRPTYYADSVKGRFTISRDNSKNTLYLQMNSLRAEDTAVYYCAKAYYSNYLFDYWGQGTLVTVSSASTKGPSVFPLAPSSKSTSGGTAALGCLVKDYFPEPVTVSWNSGALTSGVHTFPAVLQSSGLYSLSSVVTVPSSSLGTQTYICNVNHKPSNTKVDKKVEPKSCDKTHTCPPCPAPELLGGPSVFLFPPKPKDTLMISRTPEVTCVVVDVSHEDPEVKFNWYVDGVEVHNAKTKPCEEQYGSTYRCVSVLTVLHQDWLNGKEYKCKVSNKALPAPIEKTISKAKGQPREPQVYTLPPSREEMTKNQVSLTCLVKGFYPSDIAVEWESNGQPENNYKTTPPVLDSDGSFFLYSKLTVDKSRWQQGNVFSCSVMHEALHNHYTQKSLSLSPGGGGGSSPGQGTQSENSCTHFPGNLPNMLRDLRDAFSRVKTFFRMKDQLDNLLLKESLLEDFKGYLGCQALSEMIQFYLEEVMPQAENQDPDIKAHVNSLGENLKTLRLRLRRCHRFLPCENGGGSGGKSKAVEQVKNAFNKLQEKGIYKAMSEFDIFINYIEAYMTMKIRN

SEQ ID NO: 888 - protein, 237 aa, synthetic construct; identical to SEQ ID NO: 880
  REGION 1..237: note = Synthetic

SEQ ID NO: 889 - protein, 641 aa, synthetic construct
  REGION 1..641: note = Synthetic
MDMRVPAQLLGLLLLWLRGARCEVQLLESGGGLVQPGGSLRLSCAASGFTFSTYAMNWVRQAPGKGLEWVSTVSGSGRPTYYADSVKGRFTISRDNSKNTLYLQMNSLRAEDTAVYYCAKAYYSNYLFDYWGQGTLVTVSSASTKGPSVFPLAPSSKSTSGGTAALGCLVKDYFPEPVTVSWNSGALTSGVHTFPAVLQSSGLYSLSSVVTVPSSSLGTQTYICNVNHKPSNTKVDKKVEPKSCDKTHTCPPCPAPELLGGPSVFLFPPKPKDTLMISRTPEVTCVVVDVSHEDPEVKFNWYVDGVEVHNAKTKPCEEQYGSTYRCVSVLTVLHQDWLNGKEYKCKVSNKALPAPIEKTISKAKGQPREPQVYTLPPSREEMTKNQVSLTCLVKGFYPSDIAVEWESNGQPENNYKTTPPVLDSDGSFFLYSKLTVDKSRWQQGNVFSCSVMHEALHNHYTQKSLSLSPGGGGGSSPGQGTQSENSCTHFPGNLPNMLRDLRDAFSRVKTFFQMKDQLDNKLLKESLLEDFKGYLGCQALSEMIQFYLEEVMPQAENQDPDIKAHVNSLGENLKTLRLRLRRCHRFLPCENGGGSGGKSKAVEQVKNAFNKLQEKGIYKAMSEFDIFINYIEAYMTMKIRN

SEQ ID NO: 890 - protein, 237 aa, synthetic construct; identical to SEQ ID NO: 880
  REGION 1..237: note = Synthetic

SEQ ID NO: 891 - protein, 641 aa, synthetic construct
  REGION 1..641: note = Synthetic
MDMRVPAQLLGLLLLWLRGARCEVQLLESGGGLVQPGGSLRLSCAASGFTFSTYAMNWVRQAPGKGLEWVSTVSGSGRPTYYADSVKGRFTISRDNSKNTLYLQMNSLRAEDTAVYYCAKAYYSNYLFDYWGQGTLVTVSSASTKGPSVFPLAPSSKSTSGGTAALGCLVKDYFPEPVTVSWNSGALTSGVHTFPAVLQSSGLYSLSSVVTVPSSSLGTQTYICNVNHKPSNTKVDKKVEPKSCDKTHTCPPCPAPELLGGPSVFLFPPKPKDTLMISRTPEVTCVVVDVSHEDPEVKFNWYVDGVEVHNAKTKPCEEQYGSTYRCVSVLTVLHQDWLNGKEYKCKVSNKALPAPIEKTISKAKGQPREPQVYTLPPSREEMTKNQVSLTCLVKGFYPSDIAVEWESNGQPENNYKTTPPVLDSDGSFFLYSKLTVDKSRWQQGNVFSCSVMHEALHNHYTQKSLSLSPGGGGGSSPGQGTQSENSCTHFPGNLPNMLRDLRDAFSRVDTFFQMKDQLDNLLLKESLLEDFKGYLGCQALSEMIQFYLEEVMPQAENQDPDIKAHVNSLGENLKTLRLRLRRCHRFLPCENGGGSGGKSKAVEQVKNAFNKLQEKGIYKAMSEFDIFINYIEAYMTMKIRN

SEQ ID NO: 892 - protein, 237 aa, synthetic construct; identical to SEQ ID NO: 880
  REGION 1..237: note = Synthetic

SEQ ID NO: 893 - protein, 641 aa, synthetic construct
  REGION 1..641: note = Synthetic
MDMRVPAQLLGLLLLWLRGARCEVQLLESGGGLVQPGGSLRLSCAASGFTFSTYAMNWVRQAPGKGLEWVSTVSGSGRPTYYADSVKGRFTISRDNSKNTLYLQMNSLRAEDTAVYYCAKAYYSNYLFDYWGQGTLVTVSSASTKGPSVFPLAPSSKSTSGGTAALGCLVKDYFPEPVTVSWNSGALTSGVHTFPAVLQSSGLYSLSSVVTVPSSSLGTQTYICNVNHKPSNTKVDKKVEPKSCDKTHTCPPCPAPELLGGPSVFLFPPKPKDTLMISRTPEVTCVVVDVSHEDPEVKFNWYVDGVEVHNAKTKPCEEQYGSTYRCVSVLTVLHQDWLNGKEYKCKVSNKALPAPIEKTISKAKGQPREPQVYTLPPSREEMTKNQVSLTCLVKGFYPSDIAVEWESNGQPENNYKTTPPVLDSDGSFFLYSKLTVDKSRWQQGNVFSCSVMHEALHNHYTQKSLSLSPGGGGGSSPGQGTQSENSCTHFPGNLPNMLRDLRDAFSRVKTFFEMKDQLDNLLLKESLLEDFKGYLGCQALSEMIQFYLEEVMPQAENQDPDIKAHVNSLGENLKTLRLRLRRCHRFLPCENGGGSGGKSKAVEQVKNAFNKLQEKGIYKAMSEFDIFINYIEAYMTMKIRN

SEQ ID NO: 894 - protein, 237 aa, synthetic construct; identical to SEQ ID NO: 880
  REGION 1..237: note = Synthetic

SEQ ID NO: 895 - protein, 641 aa, synthetic construct
  REGION 1..641: note = Synthetic
MDMRVPAQLLGLLLLWLRGARCEVQLLESGGGMVQPGGSLRLSCAVSGFTFSRYAMSWVRQAPGKGLEWVSEMRGSSGSTYYADSVKGRFTISRDNSKNTLYLQMNSLRVEDTAIYYCAKEFSSNSLFDYWGQGTLVTVSSASTKGPSVFPLAPSSKSTSGGTAALGCLVKDYFPEPVTVSWNSGALTSGVHTFPAVLQSSGLYSLSSVVTVPSSSLGTQTYICNVNHKPSNTKVDKKVEPKSCDKTHTCPPCPAPELLGGPSVFLFPPKPKDTLMISRTPEVTCVVVDVSHEDPEVKFNWYVDGVEVHNAKTKPCEEQYGSTYRCVSVLTVLHQDWLNGKEYKCKVSNKALPAPIEKTISKAKGQPREPQVYTLPPSREEMTKNQVSLTCLVKGFYPSDIAVEWESNGQPENNYKTTPPVLDSDGSFFLYSKLTVDKSRWQQGNVFSCSVMHEALHNHYTQKSLSLSPGGGGGSSPGQGTQSENSCTHFPGNLPNMLRDLLDAFSRVKTFFQMKDQLDNLLLKESLLEDFKGYLGCQALSEMIQFYLEEVMPQAENQDPDIKAHVNSLGENLKTLRLRLRRCHRFLPCENGGGSGGKSKAVEQVKNAFNKLQEKGIYKAMSEFDIFINYIEAYMTMKIRN

SEQ ID NO: 896 - protein, 237 aa, synthetic construct; identical to SEQ ID NO: 205
  REGION 1..237: note = Synthetic

SEQ ID NO: 897 - protein, 641 aa, synthetic construct
  REGION 1..641: note = Synthetic
MDMRVPAQLLGLLLLWLRGARCEVQLLESGGGMVQPGGSLRLSCAVSGFTFSRYAMSWVRQAPGKGLEWVSEMRGSSGSTYYADSVKGRFTISRDNSKNTLYLQMNSLRVEDTAIYYCAKEFSSNSLFDYWGQGTLVTVSSASTKGPSVFPLAPSSKSTSGGTAALGCLVKDYFPEPVTVSWNSGALTSGVHTFPAVLQSSGLYSLSSVVTVPSSSLGTQTYICNVNHKPSNTKVDKKVEPKSCDKTHTCPPCPAPELLGGPSVFLFPPKPKDTLMISRTPEVTCVVVDVSHEDPEVKFNWYVDGVEVHNAKTKPCEEQYGSTYRCVSVLTVLHQDWLNGKEYKCKVSNKALPAPIEKTISKAKGQPREPQVYTLPPSREEMTKNQVSLTCLVKGFYPSDIAVEWESNGQPENNYKTTPPVLDSDGSFFLYSKLTVDKSRWQQGNVFSCSVMHEALHNHYTQKSLSLSPGGGGGSSPGQGTQSENSCTHFPGNLPNMLRDLRDAFSRVKTFFQMKDQLDNLLLKESLLEDFKGYLGCQALSEMIQFYLEEVMPQAENQDPDIKAHVNSLGENLKTLRLRLRRCHRFLPCENGGGSGGKSKAVEQVKNAFNKLQEKGIYLAMSEFDIFINYIEAYMTMKIRN

SEQ ID NO: 898 - protein, 237 aa, synthetic construct; identical to SEQ ID NO: 205
  REGION 1..237: note = Synthetic

SEQ ID NO: 899 - protein, 641 aa, synthetic construct
  REGION 1..641: note = Synthetic
MDMRVPAQLLGLLLLWLRGARCEVQLLESGGGMVQPGGSLRLSCAVSGFTFSRYAMSWVRQAPGKGLEWVSEMRGSSGSTYYADSVKGRFTISRDNSKNTLYLQMNSLRVEDTAIYYCAKEFSSNSLFDYWGQGTLVTVSSASTKGPSVFPLAPSSKSTSGGTAALGCLVKDYFPEPVTVSWNSGALTSGVHTFPAVLQSSGLYSLSSVVTVPSSSLGTQTYICNVNHKPSNTKVDKKVEPKSCDKTHTCPPCPAPELLGGPSVFLFPPKPKDTLMISRTPEVTCVVVDVSHEDPEVKFNWYVDGVEVHNAKTKPCEEQYGSTYRCVSVLTVLHQDWLNGKEYKCKVSNKALPAPIEKTISKAKGQPREPQVYTLPPSREEMTKNQVSLTCLVKGFYPSDIAVEWESNGQPENNYKTTPPVLDSDGSFFLYSKLTVDKSRWQQGNVFSCSVMHEALHNHYTQKSLSLSPGGGGGSSPGQGTQSENSCTHFPGNLPNMLRDLRDAFSRVKTFFQMKDQLDNLLLKESLLEDFKGYLGCQALSEMIQFYLEEVMPQAENQDPDIKAHVNSLGENLKTLRLRLRRCHRFLPCENGGGSGGKSKAVEQVKNAFNKLQEKGIYDAMSEFDIFINYIEAYMTMKIRN

SEQ ID NO: 900 - protein, 237 aa, synthetic construct; identical to SEQ ID NO: 205
  REGION 1..237: note = Synthetic

SEQ ID NO: 901 - protein, 641 aa, synthetic construct
  REGION 1..641: note = Synthetic
MDMRVPAQLLGLLLLWLRGARCEVQLLESGGGMVQPGGSLRLSCAVSGFTFSRYAMSWVRQAPGKGLEWVSEMRGSSGSTYYADSVKGRFTISRDNSKNTLYLQMNSLRVEDTAIYYCAKEFSSNSLFDYWGQGTLVTVSSASTKGPSVFPLAPSSKSTSGGTAALGCLVKDYFPEPVTVSWNSGALTSGVHTFPAVLQSSGLYSLSSVVTVPSSSLGTQTYICNVNHKPSNTKVDKKVEPKSCDKTHTCPPCPAPELLGGPSVFLFPPKPKDTLMISRTPEVTCVVVDVSHEDPEVKFNWYVDGVEVHNAKTKPCEEQYGSTYRCVSVLTVLHQDWLNGKEYKCKVSNKALPAPIEKTISKAKGQPREPQVYTLPPSREEMTKNQVSLTCLVKGFYPSDIAVEWESNGQPENNYKTTPPVLDSDGSFFLYSKLTVDKSRWQQGNVFSCSVMHEALHNHYTQKSLSLSPGGGGGSSPGQGTQSENSCTHFPGNLPNMLRDLRDAFSRVKTFFQMKGQLDNLLLKESLLEDFKGYLGCQALSEMIQFYLEEVMPQAENQDPDIKAHVNSLGENLKTLRLRLRRCHRFLPCENGGGSGGKSKAVEQVKNAFNKLQEKGIYKAMSEFDIFINYIEAYMTMKIRN

SEQ ID NO: 902 - protein, 237 aa, synthetic construct; identical to SEQ ID NO: 205
  REGION 1..237: note = Synthetic

SEQ ID NO: 903 - protein, 641 aa, synthetic construct
  REGION 1..641: note = Synthetic
MDMRVPAQLLGLLLLWLRGARCEVQLLESGGGMVQPGGSLRLSCAVSGFTFSRYAMSWVRQAPGKGLEWVSEMRGSSGSTYYADSVKGRFTISRDNSKNTLYLQMNSLRVEDTAIYYCAKEFSSNSLFDYWGQGTLVTVSSASTKGPSVFPLAPSSKSTSGGTAALGCLVKDYFPEPVTVSWNSGALTSGVHTFPAVLQSSGLYSLSSVVTVPSSSLGTQTYICNVNHKPSNTKVDKKVEPKSCDKTHTCPPCPAPELLGGPSVFLFPPKPKDTLMISRTPEVTCVVVDVSHEDPEVKFNWYVDGVEVHNAKTKPCEEQYGSTYRCVSVLTVLHQDWLNGKEYKCKVSNKALPAPIEKTISKAKGQPREPQVYTLPPSREEMTKNQVSLTCLVKGFYPSDIAVEWESNGQPENNYKTTPPVLDSDGSFFLYSKLTVDKSRWQQGNVFSCSVMHEALHNHYTQKSLSLSPGGGGGSSPGQGTQSENSCTHFPGNLPNMLRDLRDAFSRVKTFFRMKDQLDNLLLKESLLEDFKGYLGCQALSEMIQFYLEEVMPQAENQDPDIKAHVNSLGENLKTLRLRLRRCHRFLPCENGGGSGGKSKAVEQVKNAFNKLQEKGIYKAMSEFDIFINYIEAYMTMKIRN

SEQ ID NO: 904 - protein, 237 aa, synthetic construct; identical to SEQ ID NO: 205
  REGION 1..237: note = Synthetic

SEQ ID NO: 905 - protein, 641 aa, synthetic construct
  REGION 1..641: note = Synthetic
MDMRVPAQLLGLLLLWLRGARCEVQLLESGGGMVQPGGSLRLSCAVSGFTFSRYAMSWVRQAPGKGLEWVSEMRGSSGSTYYADSVKGRFTISRDNSKNTLYLQMNSLRVEDTAIYYCAKEFSSNSLFDYWGQGTLVTVSSASTKGPSVFPLAPSSKSTSGGTAALGCLVKDYFPEPVTVSWNSGALTSGVHTFPAVLQSSGLYSLSSVVTVPSSSLGTQTYICNVNHKPSNTKVDKKVEPKSCDKTHTCPPCPAPELLGGPSVFLFPPKPKDTLMISRTPEVTCVVVDVSHEDPEVKFNWYVDGVEVHNAKTKPCEEQYGSTYRCVSVLTVLHQDWLNGKEYKCKVSNKALPAPIEKTISKAKGQPREPQVYTLPPSREEMTKNQVSLTCLVKGFYPSDIAVEWESNGQPENNYKTTPPVLDSDGSFFLYSKLTVDKSRWQQGNVFSCSVMHEALHNHYTQKSLSLSPGGGGGSSPGQGTQSENSCTHFPGNLPNMLRDLRDAFSRVKTFFQMKDQLDNKLLKESLLEDFKGYLGCQALSEMIQFYLEEVMPQAENQDPDIKAHVNSLGENLKTLRLRLRRCHRFLPCENGGGSGGKSKAVEQVKNAFNKLQEKGIYKAMSEFDIFINYIEAYMTMKIRN

SEQ ID NO: 906 - protein, 237 aa, synthetic construct; identical to SEQ ID NO: 205
  REGION 1..237: note = Synthetic

SEQ ID NO: 907 - protein, 641 aa, synthetic construct
  REGION 1..641: note = Synthetic
MDMRVPAQLLGLLLLWLRGARCEVQLLESGGGMVQPGGSLRLSCAVSGFTFSRYAMSWVRQAPGKGLEWVSEMRGSSGSTYYADSVKGRFTISRDNSKNTLYLQMNSLRVEDTAIYYCAKEFSSNSLFDYWGQGTLVTVSSASTKGPSVFPLAPSSKSTSGGTAALGCLVKDYFPEPVTVSWNSGALTSGVHTFPAVLQSSGLYSLSSVVTVPSSSLGTQTYICNVNHKPSNTKVDKKVEPKSCDKTHTCPPCPAPELLGGPSVFLFPPKPKDTLMISRTPEVTCVVVDVSHEDPEVKFNWYVDGVEVHNAKTKPCEEQYGSTYRCVSVLTVLHQDWLNGKEYKCKVSNKALPAPIEKTISKAKGQPREPQVYTLPPSREEMTKNQVSLTCLVKGFYPSDIAVEWESNGQPENNYKTTPPVLDSDGSFFLYSKLTVDKSRWQQGNVFSCSVMHEALHNHYTQKSLSLSPGGGGGSSPGQGTQSENSCTHFPGNLPNMLRDLRDAFSRVDTFFQMKDQLDNLLLKESLLEDFKGYLGCQALSEMIQFYLEEVMPQAENQDPDIKAHVNSLGENLKTLRLRLRRCHRFLPCENGGGSGGKSKAVEQVKNAFNKLQEKGIYKAMSEFDIFINYIEAYMTMKIRN

SEQ ID NO: 908 - protein, 237 aa, synthetic construct; identical to SEQ ID NO: 205
  REGION 1..237: note = Synthetic

SEQ ID NO: 909 - protein, 641 aa, synthetic construct
  REGION 1..641: note = Synthetic
MDMRVPAQLLGLLLLWLRGARCEVQLLESGGGMVQPGGSLRLSCAVSGFTFSRYAMSWVRQAPGKGLEWVSEMRGSSGSTYYADSVKGRFTISRDNSKNTLYLQMNSLRVEDTAIYYCAKEFSSNSLFDYWGQGTLVTVSSASTKGPSVFPLAPSSKSTSGGTAALGCLVKDYFPEPVTVSWNSGALTSGVHTFPAVLQSSGLYSLSSVVTVPSSSLGTQTYICNVNHKPSNTKVDKKVEPKSCDKTHTCPPCPAPELLGGPSVFLFPPKPKDTLMISRTPEVTCVVVDVSHEDPEVKFNWYVDGVEVHNAKTKPCEEQYGSTYRCVSVLTVLHQDWLNGKEYKCKVSNKALPAPIEKTISKAKGQPREPQVYTLPPSREEMTKNQVSLTCLVKGFYPSDIAVEWESNGQPENNYKTTPPVLDSDGSFFLYSKLTVDKSRWQQGNVFSCSVMHEALHNHYTQKSLSLSPGGGGGSSPGQGTQSENSCTHFPGNLPNMLRDLRDAFSRVKTFFEMKDQLDNLLLKESLLEDFKGYLGCQALSEMIQFYLEEVMPQAENQDPDIKAHVNSLGENLKTLRLRLRRCHRFLPCENGGGSGGKSKAVEQVKNAFNKLQEKGIYKAMSEFDIFINYIEAYMTMKIRN

SEQ ID NO: 910 - protein, 237 aa, synthetic construct; identical to SEQ ID NO: 205
  REGION 1..237: note = Synthetic

SEQ ID NO: 911 - protein, 638 aa, synthetic construct
  REGION 1..638: note = Synthetic
MDMRVPAQLLGLLLLWLRGARCEVQLVESGGGLVQPGGSLRLSCAASGFTFSSNWMSWVRQAPGKGLDWMASMKQDGSEIYYVDSVKGRFTISRDNAKNSLHLQMNSLRAEDTAVYYCVRGGWRFESWGQGALVTVSSASTKGPSVFPLAPSSKSTSGGTAALGCLVKDYFPEPVTVSWNSGALTSGVHTFPAVLQSSGLYSLSSVVTVPSSSLGTQTYICNVNHKPSNTKVDKKVEPKSCDKTHTCPPCPAPELLGGPSVFLFPPKPKDTLMISRTPEVTCVVVDVSHEDPEVKFNWYVDGVEVHNAKTKPCEEQYGSTYRCVSVLTVLHQDWLNGKEYKCKVSNKALPAPIEKTISKAKGQPREPQVYTLPPSREEMTKNQVSLTCLVKGFYPSDIAVEWESNGQPENNYKTTPPVLDSDGSFFLYSKLTVDKSRWQQGNVFSCSVMHEALHNHYTQKSLSLSPGGGGGSSPGQGTQSENSCTHFPGNLPNMLRDLLDAFSRVKTFFQMKDQLDNLLLKESLLEDFKGYLGCQALSEMIQFYLEEVMPQAENQDPDIKAHVNSLGENLKTLRLRLRRCHRFLPCENGGGSGGKSKAVEQVKNAFNKLQEKGIYKAMSEFDIFINYIEAYMTMKIRN

SEQ ID NO: 912 - protein, 236 aa, synthetic construct
  REGION 1..236: note = Synthetic
MDMRVPAQLLGLLLLWLRGARCEIVMTQSPATLSVSPGERATLSCRASQSVSSNLAWYQQKSGQAPRLLIYGASIRATGIPARVSGSGSGTEFTFTISSLQSEDFAVYYCQQYKNWPLTFGGGTKVEIKRTVAAPSVFIFPPSDEQLKSGTASVVCLLNNFYPREAKVQWKVDNALQSGNSQESVTEQDSKDSTYSLSSTLTLSKADYEKHKVYACEVTHQGLSSPVTKSFNRGEC

SEQ ID NO: 913 - protein, 638 aa, synthetic construct
  REGION 1..638: note = Synthetic
MDMRVPAQLLGLLLLWLRGARCEVQLVESGGGLVQPGGSLRLSCAASGFTFSSNWMSWVRQAPGKGLDWMASMKQDGSEIYYVDSVKGRFTISRDNAKNSLHLQMNSLRAEDTAVYYCVRGGWRFESWGQGALVTVSSASTKGPSVFPLAPSSKSTSGGTAALGCLVKDYFPEPVTVSWNSGALTSGVHTFPAVLQSSGLYSLSSVVTVPSSSLGTQTYICNVNHKPSNTKVDKKVEPKSCDKTHTCPPCPAPELLGGPSVFLFPPKPKDTLMISRTPEVTCVVVDVSHEDPEVKFNWYVDGVEVHNAKTKPCEEQYGSTYRCVSVLTVLHQDWLNGKEYKCKVSNKALPAPIEKTISKAKGQPREPQVYTLPPSREEMTKNQVSLTCLVKGFYPSDIAVEWESNGQPENNYKTTPPVLDSDGSFFLYSKLTVDKSRWQQGNVFSCSVMHEALHNHYTQKSLSLSPGGGGGSSPGQGTQSENSCTHFPGNLPNMLRDLRDAFSRVKTFFQMKDQLDNLLLKESLLEDFKGYLGCQALSEMIQFYLEEVMPQAENQDPDIKAHVNSLGENLKTLRLRLRRCHRFLPCENGGGSGGKSKAVEQVKNAFNKLQEKGIYLAMSEFDIFINYIEAYMTMKIRN

SEQ ID NO: 914 - protein, 236 aa, synthetic construct; identical to SEQ ID NO: 912
  REGION 1..236: note = Synthetic

SEQ ID NO: 915 - protein, 638 aa, synthetic construct
  REGION 1..638: note = Synthetic
MDMRVPAQLLGLLLLWLRGARCEVQLVESGGGLVQPGGSLRLSCAASGFTFSSNWMSWVRQAPGKGLDWMASMKQDGSEIYYVDSVKGRFTISRDNAKNSLHLQMNSLRAEDTAVYYCVRGGWRFESWGQGALVTVSSASTKGPSVFPLAPSSKSTSGGTAALGCLVKDYFPEPVTVSWNSGALTSGVHTFPAVLQSSGLYSLSSVVTVPSSSLGTQTYICNVNHKPSNTKVDKKVEPKSCDKTHTCPPCPAPELLGGPSVFLFPPKPKDTLMISRTPEVTCVVVDVSHEDPEVKFNWYVDGVEVHNAKTKPCEEQYGSTYRCVSVLTVLHQDWLNGKEYKCKVSNKALPAPIEKTISKAKGQPREPQVYTLPPSREEMTKNQVSLTCLVKGFYPSDIAVEWESNGQPENNYKTTPPVLDSDGSFFLYSKLTVDKSRWQQGNVFSCSVMHEALHNHYTQKSLSLSPGGGGGSSPGQGTQSENSCTHFPGNLPNMLRDLRDAFSRVKTFFQMKDQLDNLLLKESLLEDFKGYLGCQALSEMIQFYLEEVMPQAENQDPDIKAHVNSLGENLKTLRLRLRRCHRFLPCENGGGSGGKSKAVEQVKNAFNKLQEKGIYDAMSEFDIFINYIEAYMTMKIRN

SEQ ID NO: 916 - protein, 236 aa, synthetic construct; identical to SEQ ID NO: 912
  REGION 1..236: note = Synthetic

SEQ ID NO: 917 - protein, 638 aa, synthetic construct
  REGION 1..638: note = Synthetic
MDMRVPAQLLGLLLLWLRGARCEVQLVESGGGLVQPGGSLRLSCAASGFTFSSNWMSWVRQAPGKGLDWMASMKQDGSEIYYVDSVKGRFTISRDNAKNSLHLQMNSLRAEDTAVYYCVRGGWRFESWGQGALVTVSSASTKGPSVFPLAPSSKSTSGGTAALGCLVKDYFPEPVTVSWNSGALTSGVHTFPAVLQSSGLYSLSSVVTVPSSSLGTQTYICNVNHKPSNTKVDKKVEPKSCDKTHTCPPCPAPELLGGPSVFLFPPKPKDTLMISRTPEVTCVVVDVSHEDPEVKFNWYVDGVEVHNAKTKPCEEQYGSTYRCVSVLTVLHQDWLNGKEYKCKVSNKALPAPIEKTISKAKGQPREPQVYTLPPSREEMTKNQVSLTCLVKGFYPSDIAVEWESNGQPENNYKTTPPVLDSDGSFFLYSKLTVDKSRWQQGNVFSCSVMHEALHNHYTQKSLSLSPGGGGGSSPGQGTQSENSCTHFPGNLPNMLRDLRDAFSRVKTFFQMKGQLDNLLLKESLLEDFKGYLGCQALSEMIQFYLEEVMPQAENQDPDIKAHVNSLGENLKTLRLRLRRCHRFLPCENGGGSGGKSKAVEQVKNAFNKLQEKGIYKAMSEFDIFINYIEAYMTMKIRN

SEQ ID NO: 918 - protein, 236 aa, synthetic construct; identical to SEQ ID NO: 912
  REGION 1..236: note = Synthetic

SEQ ID NO: 919 - protein, 638 aa, synthetic construct
  REGION 1..638: note = Synthetic
MDMRVPAQLLGLLLLWLRGARCEVQLVESGGGLVQPGGSLRLSCAASGFTFSSNWMSWVRQAPGKGLDWMASMKQDGSEIYYVDSVKGRFTISRDNAKNSLHLQMNSLRAEDTAVYYCVRGGWRFESWGQGALVTVSSASTKGPSVFPLAPSSKSTSGGTAALGCLVKDYFPEPVTVSWNSGALTSGVHTFPAVLQSSGLYSLSSVVTVPSSSLGTQTYICNVNHKPSNTKVDKKVEPKSCDKTHTCPPCPAPELLGGPSVFLFPPKPKDTLMISRTPEVTCVVVDVSHEDPEVKFNWYVDGVEVHNAKTKPCEEQYGSTYRCVSVLTVLHQDWLNGKEYKCKVSNKALPAPIEKTISKAKGQPREPQVYTLPPSREEMTKNQVSLTCLVKGFYPSDIAVEWESNGQPENNYKTTPPVLDSDGSFFLYSKLTVDKSRWQQGNVFSCSVMHEALHNHYTQKSLSLSPGGGGGSSPGQGTQSENSCTHFPGNLPNMLRDLRDAFSRVKTFFRMKDQLDNLLLKESLLEDFKGYLGCQALSEMIQFYLEEVMPQAENQDPDIKAHVNSLGENLKTLRLRLRRCHRFLPCENGGGSGGKSKAVEQVKNAFNKLQEKGIYKAMSEFDIFINYIEAYMTMKIRN

SEQ ID NO: 920 - protein, 236 aa, synthetic construct; identical to SEQ ID NO: 912
  REGION 1..236: note = Synthetic

SEQ ID NO: 921 - protein, 638 aa, synthetic construct
  REGION 1..638: note = Synthetic
MDMRVPAQLLGLLLLWLRGARCEVQLVESGGGLVQPGGSLRLSCAASGFTFSSNWMSWVRQAPGKGLDWMASMKQDGSEIYYVDSVKGRFTISRDNAKNSLHLQMNSLRAEDTAVYYCVRGGWRFESWGQGALVTVSSASTKGPSVFPLAPSSKSTSGGTAALGCLVKDYFPEPVTVSWNSGALTSGVHTFPAVLQSSGLYSLSSVVTVPSSSLGTQTYICNVNHKPSNTKVDKKVEPKSCDKTHTCPPCPAPELLGGPSVFLFPPKPKDTLMISRTPEVTCVVVDVSHEDPEVKFNWYVDGVEVHNAKTKPCEEQYGSTYRCVSVLTVLHQDWLNGKEYKCKVSNKALPAPIEKTISKAKGQPREPQVYTLPPSREEMTKNQVSLTCLVKGFYPSDIAVEWESNGQPENNYKTTPPVLDSDGSFFLYSKLTVDKSRWQQGNVFSCSVMHEALHNHYTQKSLSLSPGGGGGSSPGQGTQSENSCTHFPGNLPNMLRDLRDAFSRVKTFFQMKDQLDNKLLKESLLEDFKGYLGCQALSEMIQFYLEEVMPQAENQDPDIKAHVNSLGENLKTLRLRLRRCHRFLPCENGGGSGGKSKAVEQVKNAFNKLQEKGIYKAMSEFDIFINYIEAYMTMKIRN

SEQ ID NO: 922 - protein, 236 aa, synthetic construct; identical to SEQ ID NO: 912
  REGION 1..236: note = Synthetic

SEQ ID NO: 923 - protein, 638 aa, synthetic construct
  REGION 1..638: note = Synthetic
MDMRVPAQLLGLLLLWLRGARCEVQLVESGGGLVQPGGSLRLSCAASGFTFSSNWMSWVRQAPGKGLDWMASMKQDGSEIYYVDSVKGRFTISRDNAKNSLHLQMNSLRAEDTAVYYCVRGGWRFESWGQGALVTVSSASTKGPSVFPLAPSSKSTSGGTAALGCLVKDYFPEPVTVSWNSGALTSGVHTFPAVLQSSGLYSLSSVVTVPSSSLGTQTYICNVNHKPSNTKVDKKVEPKSCDKTHTCPPCPAPELLGGPSVFLFPPKPKDTLMISRTPEVTCVVVDVSHEDPEVKFNWYVDGVEVHNAKTKPCEEQYGSTYRCVSVLTVLHQDWLNGKEYKCKVSNKALPAPIEKTISKAKGQPREPQVYTLPPSREEMTKNQVSLTCLVKGFYPSDIAVEWESNGQPENNYKTTPPVLDSDGSFFLYSKLTVDKSRWQQGNVFSCSVMHEALHNHYTQKSLSLSPGGGGGSSPGQGTQSENSCTHFPGNLPNMLRDLRDAFSRVDTFFQMKDQLDNLLLKESLLEDFKGYLGCQALSEMIQFYLEEVMPQAENQDPDIKAHVNSLGENLKTLRLRLRRCHRFLPCENGGGSGGKSKAVEQVKNAFNKLQEKGIYKAMSEFDIFINYIEAYMTMKIRN

SEQ ID NO: 924 - protein, 236 aa, synthetic construct; identical to SEQ ID NO: 912
  REGION 1..236: note = Synthetic

SEQ ID NO: 925 - protein, 638 aa, synthetic construct
  REGION 1..638: note = Synthetic
MDMRVPAQLLGLLLLWLRGARCEVQLVESGGGLVQPGGSLRLSCAASGFTFSSNWMSWVRQAPGKGLDWMASMKQDGSEIYYVDSVKGRFTISRDNAKNSLHLQMNSLRAEDTAVYYCVRGGWRFESWGQGALVTVSSASTKGPSVFPLAPSSKSTSGGTAALGCLVKDYFPEPVTVSWNSGALTSGVHTFPAVLQSSGLYSLSSVVTVPSSSLGTQTYICNVNHKPSNTKVDKKVEPKSCDKTHTCPPCPAPELLGGPSVFLFPPKPKDTLMISRTPEVTCVVVDVSHEDPEVKFNWYVDGVEVHNAKTKPCEEQYGSTYRCVSVLTVLHQDWLNGKEYKCKVSNKALPAPIEKTISKAKGQPREPQVYTLPPSREEMTKNQVSLTCLVKGFYPSDIAVEWESNGQPENNYKTTPPVLDSDGSFFLYSKLTVDKSRWQQGNVFSCSVMHEALHNHYTQKSLSLSPGGGGGSSPGQGTQSENSCTHFPGNLPNMLRDLRDAFSRVKTFFEMKDQLDNLLLKESLLEDFKGYLGCQALSEMIQFYLEEVMPQAENQDPDIKAHVNSLGENLKTLRLRLRRCHRFLPCENGGGSGGKSKAVEQVKNAFNKLQEKGIYKAMSEFDIFINYIEAYMTMKIRN

SEQ ID NO: 926 - protein, 236 aa, synthetic construct; identical to SEQ ID NO: 912
  REGION 1..236: note = Synthetic

SEQ ID NO: 927 - protein, 639 aa, synthetic construct
  REGION 1..639: note = Synthetic
MDMRVPAQLLGLLLLWLRGARCEVQLVESGGGLVQPGGSLRLSCAASGFTFSSYWMSWVRQAPGKGLEWVANIKQDGSEEYYVDSVKGRFTISRDNAKNSLFLQMNSLRAEDTAVYYCARDYGDSFDYWGQGTLVTVSSASTKGPSVFPLAPSSKSTSGGTAALGCLVKDYFPEPVTVSWNSGALTSGVHTFPAVLQSSGLYSLSSVVTVPSSSLGTQTYICNVNHKPSNTKVDKKVEPKSCDKTHTCPPCPAPELLGGPSVFLFPPKPKDTLMISRTPEVTCVVVDVSHEDPEVKFNWYVDGVEVHNAKTKPCEEQYGSTYRCVSVLTVLHQDWLNGKEYKCKVSNKALPAPIEKTISKAKGQPREPQVYTLPPSREEMTKNQVSLTCLVKGFYPSDIAVEWESNGQPENNYKTTPPVLDSDGSFFLYSKLTVDKSRWQQGNVFSCSVMHEALHNHYTQKSLSLSPGGGGGSSPGQGTQSENSCTHFPGNLPNMLRDLLDAFSRVKTFFQMKDQLDNLLLKESLLEDFKGYLGCQALSEMIQFYLEEVMPQAENQDPDIKAHVNSLGENLKTLRLRLRRCHRFLPCENGGGSGGKSKAVEQVKNAFNKLQEKGIYKAMSEFDIFINYIEAYMTMKIRN

SEQ ID NO: 928 - protein, 236 aa, synthetic construct; identical to SEQ ID NO: 165
  REGION 1..236: note = Synthetic

SEQ ID NO: 929 - protein, 639 aa, synthetic construct
  REGION 1..639: note = Synthetic
MDMRVPAQLLGLLLLWLRGARCEVQLVESGGGLVQPGGSLRLSCAASGFTFSSYWMSWVRQAPGKGLEWVANIKQDGSEEYYVDSVKGRFTISRDNAKNSLFLQMNSLRAEDTAVYYCARDYGDSFDYWGQGTLVTVSSASTKGPSVFPLAPSSKSTSGGTAALGCLVKDYFPEPVTVSWNSGALTSGVHTFPAVLQSSGLYSLSSVVTVPSSSLGTQTYICNVNHKPSNTKVDKKVEPKSCDKTHTCPPCPAPELLGGPSVFLFPPKPKDTLMISRTPEVTCVVVDVSHEDPEVKFNWYVDGVEVHNAKTKPCEEQYGSTYRCVSVLTVLHQDWLNGKEYKCKVSNKALPAPIEKTISKAKGQPREPQVYTLPPSREEMTKNQVSLTCLVKGFYPSDIAVEWESNGQPENNYKTTPPVLDSDGSFFLYSKLTVDKSRWQQGNVFSCSVMHEALHNHYTQKSLSLSPGGGGGSSPGQGTQSENSCTHFPGNLPNMLRDLRDAFSRVKTFFQMKDQLDNLLLKESLLEDFKGYLGCQALSEMIQFYLEEVMPQAENQDPDIKAHVNSLGENLKTLRLRLRRCHRFLPCENGGGSGGKSKAVEQVKNAFNKLQEKGIYLAMSEFDIFINYIEAYMTMKIRN

SEQ ID NO: 930 - protein, 236 aa, synthetic construct; identical to SEQ ID NO: 165
  REGION 1..236: note = Synthetic

SEQ ID NO: 931 - protein, 639 aa, synthetic construct
  REGION 1..639: note = Synthetic
MDMRVPAQLLGLLLLWLRGARCEVQLVESGGGLVQPGGSLRLSCAASGFTFSSYWMSWVRQAPGKGLEWVANIKQDGSEEYYVDSVKGRFTISRDNAKNSLFLQMNSLRAEDTAVYYCARDYGDSFDYWGQGTLVTVSSASTKGPSVFPLAPSSKSTSGGTAALGCLVKDYFPEPVTVSWNSGALTSGVHTFPAVLQSSGLYSLSSVVTVPSSSLGTQTYICNVNHKPSNTKVDKKVEPKSCDKTHTCPPCPAPELLGGPSVFLFPPKPKDTLMISRTPEVTCVVVDVSHEDPEVKFNWYVDGVEVHNAKTKPCEEQYGSTYRCVSVLTVLHQDWLNGKEYKCKVSNKALPAPIEKTISKAKGQPREPQVYTLPPSREEMTKNQVSLTCLVKGFYPSDIAVEWESNGQPENNYKTTPPVLDSDGSFFLYSKLTVDKSRWQQGNVFSCSVMHEALHNHYTQKSLSLSPGGGGGSSPGQGTQSENSCTHFPGNLPNMLRDLRDAFSRVKTFFQMKDQLDNLLLKESLLEDFKGYLGCQALSEMIQFYLEEVMPQAENQDPDIKAHVNSLGENLKTLRLRLRRCHRFLPCENGGGSGGKSKAVEQVKNAFNKLQEKGIYDAMSEFDIFINYIEAYMTMKIRN

SEQ ID NO: 932 - protein, 236 aa, synthetic construct; identical to SEQ ID NO: 165
  REGION 1..236: note = Synthetic

SEQ ID NO: 933 - protein, 639 aa, synthetic construct
  REGION 1..639: note = Synthetic
MDMRVPAQLLGLLLLWLRGARCEVQLVESGGGLVQPGGSLRLSCAASGFTFSSYWMSWVRQAPGKGLEWVANIKQDGSEEYYVDSVKGRFTISRDNAKNSLFLQMNSLRAEDTAVYYCARDYGDSFDYWGQGTLVTVSSASTKGPSVFPLAPSSKSTSGGTAALGCLVKDYFPEPVTVSWNSGALTSGVHTFPAVLQSSGLYSLSSVVTVPSSSLGTQTYICNVNHKPSNTKVDKKVEPKSCDKTHTCPPCPAPELLGGPSVFLFPPKPKDTLMISRTPEVTCVVVDVSHEDPEVKFNWYVDGVEVHNAKTKPCEEQYGSTYRCVSVLTVLHQDWLNGKEYKCKVSNKALPAPIEKTISKAKGQPREPQVYTLPPSREEMTKNQVSLTCLVKGFYPSDIAVEWESNGQPENNYKTTPPVLDSDGSFFLYSKLTVDKSRWQQGNVFSCSVMHEALHNHYTQKSLSLSPGGGGGSSPGQGTQSENSCTHFPGNLPNMLRDLRDAFSRVKTFFQMKGQLDNLLLKESLLEDFKGYLGCQALSEMIQFYLEEVMPQAENQDPDIKAHVNSLGENLKTLRLRLRRCHRFLPCENGGGSGGKSKAVEQVKNAFNKLQEKGIYKAMSEFDIFINYIEAYMTMKIRN

SEQ ID NO: 934 - protein, 236 aa, synthetic construct; identical to SEQ ID NO: 165
  REGION 1..236: note = Synthetic

SEQ ID NO: 935 - protein, 639 aa, synthetic construct
  REGION 1..639: note = Synthetic
MDMRVPAQLLGLLLLWLRGARCEVQLVESGGGLVQPGGSLRLSCAASGFTFSSYWMSWVRQAPGKGLEWVANIKQDGSEEYYVDSVKGRFTISRDNAKNSLFLQMNSLRAEDTAVYYCARDYGDSFDYWGQGTLVTVSSASTKGPSVFPLAPSSKSTSGGTAALGCLVKDYFPEPVTVSWNSGALTSGVHTFPAVLQSSGLYSLSSVVTVPSSSLGTQTYICNVNHKPSNTKVDKKVEPKSCDKTHTCPPCPAPELLGGPSVFLFPPKPKDTLMISRTPEVTCVVVDVSHEDPEVKFNWYVDGVEVHNAKTKPCEEQYGSTYRCVSVLTVLHQDWLNGKEYKCKVSNKALPAPIEKTISKAKGQPREPQVYTLPPSREEMTKNQVSLTCLVKGFYPSDIAVEWESNGQPENNYKTTPPVLDSDGSFFLYSKLTVDKSRWQQGNVFSCSVMHEALHNHYTQKSLSLSPGGGGGSSPGQGTQSENSCTHFPGNLPNMLRDLRDAFSRVKTFFRMKDQLDNLLLKESLLEDFKGYLGCQALSEMIQFYLEEVMPQAENQDPDIKAHVNSLGENLKTLRLRLRRCHRFLPCENGGGSGGKSKAVEQVKNAFNKLQEKGIYKAMSEFDIFINYIEAYMTMKIRN

SEQ ID NO: 936 - protein, 236 aa, synthetic construct; identical to SEQ ID NO: 165
  REGION 1..236: note = Synthetic

SEQ ID NO: 937 - protein, 639 aa, synthetic construct
  REGION 1..639: note = Synthetic
MDMRVPAQLLGLLLLWLRGARCEVQLVESGGGLVQPGGSLRLSCAASGFTFSSYWMSWVRQAPGKGLEWVANIKQDGSEEYYVDSVKGRFTISRDNAKNSLFLQMNSLRAEDTAVYYCARDYGDSFDYWGQGTLVTVSSASTKGPSVFPLAPSSKSTSGGTAALGCLVKDYFPEPVTVSWNSGALTSGVHTFPAVLQSSGLYSLSSVVTVPSSSLGTQTYICNVNHKPSNTKVDKKVEPKSCDKTHTCPPCPAPELLGGPSVFLFPPKPKDTLMISRTPEVTCVVVDVSHEDPEVKFNWYVDGVEVHNAKTKPCEEQYGSTYRCVSVLTVLHQDWLNGKEYKCKVSNKALPAPIEKTISKAKGQPREPQVYTLPPSREEMTKNQVSLTCLVKGFYPSDIAVEWESNGQPENNYKTTPPVLDSDGSFFLYSKLTVDKSRWQQGNVFSCSVMHEALHNHYTQKSLSLSPGGGGGSSPGQGTQSENSCTHFPGNLPNMLRDLRDAFSRVKTFFQMKDQLDNKLLKESLLEDFKGYLGCQALSEMIQFYLEEVMPQAENQDPDIKAHVNSLGENLKTLRLRLRRCHRFLPCENGGGSGGKSKAVEQVKNAFNKLQEKGIYKAMSEFDIFINYIEAYMTMKIRN

SEQ ID NO: 938 - protein, 236 aa, synthetic construct; identical to SEQ ID NO: 165
  REGION 1..236: note = Synthetic

SEQ ID NO: 939 - protein, 639 aa, synthetic construct
  REGION 1..639: note = Synthetic
MDMRVPAQLLGLLLLWLRGARCEVQLVESGGGLVQPGGSLRLSCAASGFTFSSYWMSWVRQAPGKGLEWVANIKQDGSEEYYVDSVKGRFTISRDNAKNSLFLQMNSLRAEDTAVYYCARDYGDSFDYWGQGTLVTVSSASTKGPSVFPLAPSSKSTSGGTAALGCLVKDYFPEPVTVSWNSGALTSGVHTFPAVLQSSGLYSLSSVVTVPSSSLGTQTYICNVNHKPSNTKVDKKVEPKSCDKTHTCPPCPAPELLGGPSVFLFPPKPKDTLMISRTPEVTCVVVDVSHEDPEVKFNWYVDGVEVHNAKTKPCEEQYGSTYRCVSVLTVLHQDWLNGKEYKCKVSNKALPAPIEKTISKAKGQPREPQVYTLPPSREEMTKNQVSLTCLVKGFYPSDIAVEWESNGQPENNYKTTPPVLDSDGSFFLYSKLTVDKSRWQQGNVFSCSVMHEALHNHYTQKSLSLSPGGGGGSSPGQGTQSENSCTHFPGNLPNMLRDLRDAFSRVDTFFQMKDQLDNLLLKESLLEDFKGYLGCQALSEMIQFYLEEVMPQAENQDPDIKAHVNSLGENLKTLRLRLRRCHRFLPCENGGGSGGKSKAVEQVKNAFNKLQEKGIYKAMSEFDIFINYIEAYMTMKIRN

SEQ ID NO: 940 - protein, 236 aa, synthetic construct; identical to SEQ ID NO: 165
  REGION 1..236: note = Synthetic

SEQ ID NO: 941 - protein, 639 aa, synthetic construct
  REGION 1..639: note = Synthetic
MDMRVPAQLLGLLLLWLRGARCEVQLVESGGGLVQPGGSLRLSCAASGFTFSSYWMSWVRQAPGKGLEWVANIKQDGSEEYYVDSVKGRFTISRDNAKNSLFLQMNSLRAEDTAVYYCARDYGDSFDYWGQGTLVTVSSASTKGPSVFPLAPSSKSTSGGTAALGCLVKDYFPEPVTVSWNSGALTSGVHTFPAVLQSSGLYSLSSVVTVPSSSLGTQTYICNVNHKPSNTKVDKKVEPKSCDKTHTCPPCPAPELLGGPSVFLFPPKPKDTLMISRTPEVTCVVVDVSHEDPEVKFNWYVDGVEVHNAKTKPCEEQYGSTYRCVSVLTVLHQDWLNGKEYKCKVSNKALPAPIEKTISKAKGQPREPQVYTLPPSREEMTKNQVSLTCLVKGFYPSDIAVEWESNGQPENNYKTTPPVLDSDGSFFLYSKLTVDKSRWQQGNVFSCSVMHEALHNHYTQKSLSLSPGGGGGSSPGQGTQSENSCTHFPGNLPNMLRDLRDAFSRVKTFFEMKDQLDNLLLKESLLEDFKGYLGCQALSEMIQFYLEEVMPQAENQDPDIKAHVNSLGENLKTLRLRLRRCHRFLPCENGGGSGGKSKAVEQVKNAFNKLQEKGIYKAMSEFDIFINYIEAYMTMKIRN

SEQ ID NO: 942 - protein, 236 aa, synthetic construct; identical to SEQ ID NO: 165
  REGION 1..236: note = Synthetic

SEQ ID NO: 943 - protein, 644 aa, synthetic construct
  REGION 1..644: note = Synthetic
MDMRVPAQLLGLLLLWLRGARCQVQLVQSGAEVKKPGASVKVSCKASGYTFTRYDINWVRQATGQGLEWMGWLNPNSGNTGQTQKFRGRVTMTRDTSINTAYMELSSLRSEDTAVYYCARGGYTSAWRWYFDLWGRGTLVTVSSASTKGPSVFPLAPSSKSTSGGTAALGCLVKDYFPEPVTVSWNSGALTSGVHTFPAVLQSSGLYSLSSVVTVPSSSLGTQTYICNVNHKPSNTKVDKKVEPKSCDKTHTCPPCPAPELLGGPSVFLFPPKPKDTLMISRTPEVTCVVVDVSHEDPEVKFNWYVDGVEVHNAKTKPCEEQYGSTYRCVSVLTVLHQDWLNGKEYKCKVSNKALPAPIEKTISKAKGQPREPQVYTLPPSREEMTKNQVSLTCLVKGFYPSDIAVEWESNGQPENNYKTTPPVLDSDGSFFLYSKLTVDKSRWQQGNVFSCSVMHEALHNHYTQKSLSLSPGGGGGSSPGQGTQSENSCTHFPGNLPNMLRDLLDAFSRVKTFFQMKDQLDNLLLKESLLEDFKGYLGCQALSEMIQFYLEEVMPQAENQDPDIKAHVNSLGENLKTLRLRLRRCHRFLPCENGGGSGGKSKAVEQVKNAFNKLQEKGIYKAMSEFDIFINYIEAYMTMKIRN

SEQ ID NO: 944 - protein, 236 aa, synthetic construct
  REGION 1..236: note = Synthetic
MDMRVPAQLLGLLLLWLRGARCDIQMTQSPSSLSASVGDRVTITCQASQDINNHLNWYQQKPGKAPKLLIYDVSNLETGVPSSFSGSGSGTDFTFTISSLQPEDIATYFCQQYDKLPLTFGGGTKVEIKRTVAAPSVFIFPPSDEQLKSGTASVVCLLNNFYPREAKVQWKVDNALQSGNSQESVTEQDSKDSTYSLSSTLTLSKADYEKHKVYACEVTHQGLSSPVTKSFNRGEC

SEQ ID NO: 945 - protein, 644 aa, synthetic construct
  REGION 1..644: note = Synthetic
MDMRVPAQLLGLLLLWLRGARCQVQLVQSGAEVKKPGASVKVSCKASGYTFTRYDINWVRQATGQGLEWMGWLNPNSGNTGQTQKFRGRVTMTRDTSINTAYMELSSLRSEDTAVYYCARGGYTSAWRWYFDLWGRGTLVTVSSASTKGPSVFPLAPSSKSTSGGTAALGCLVKDYFPEPVTVSWNSGALTSGVHTFPAVLQSSGLYSLSSVVTVPSSSLGTQTYICNVNHKPSNTKVDKKVEPKSCDKTHTCPPCPAPELLGGPSVFLFPPKPKDTLMISRTPEVTCVVVDVSHEDPEVKFNWYVDGVEVHNAKTKPCEEQYGSTYRCVSVLTVLHQDWLNGKEYKCKVSNKALPAPIEKTISKAKGQPREPQVYTLPPSREEMTKNQVSLTCLVKGFYPSDIAVEWESNGQPENNYKTTPPVLDSDGSFFLYSKLTVDKSRWQQGNVFSCSVMHEALHNHYTQKSLSLSPGGGGGSSPGQGTQSENSCTHFPGNLPNMLRDLRDAFSRVKTFFQMKDQLDNLLLKESLLEDFKGYLGCQALSEMIQFYLEEVMPQAENQDPDIKAHVNSLGENLKTLRLRLRRCHRFLPCENGGGSGGKSKAVEQVKNAFNKLQEKGIYLAMSEFDIFINYIEAYMTMKIRN

SEQ ID NO: 946 - protein, 236 aa, synthetic construct; identical to SEQ ID NO: 944
  REGION 1..236: note = Synthetic

SEQ ID NO: 947 - protein, 644 aa, synthetic construct
  REGION 1..644: note = Synthetic
MDMRVPAQLLGLLLLWLRGARCQVQLVQSGAEVKKPGASVKVSCKASGYTFTRYDINWVRQATGQGLEWMGWLNPNSGNTGQTQKFRGRVTMTRDTSINTAYMELSSLRSEDTAVYYCARGGYTSAWRWYFDLWGRGTLVTVSSASTKGPSVFPLAPSSKSTSGGTAALGCLVKDYFPEPVTVSWNSGALTSGVHTFPAVLQSSGLYSLSSVVTVPSSSLGTQTYICNVNHKPSNTKVDKKVEPKSCDKTHTCPPCPAPELLGGPSVFLFPPKPKDTLMISRTPEVTCVVVDVSHEDPEVKFNWYVDGVEVHNAKTKPCEEQYGSTYRCVSVLTVLHQDWLNGKEYKCKVSNKALPAPIEKTISKAKGQPREPQVYTLPPSREEMTKNQVSLTCLVKGFYPSDIAVEWESNGQPENNYKTTPPVLDSDGSFFLYSKLTVDKSRWQQGNVFSCSVMHEALHNHYTQKSLSLSPGGGGGSSPGQGTQSENSCTHFPGNLPNMLRDLRDAFSRVKTFFQMKDQLDNLLLKESLLEDFKGYLGCQALSEMIQFYLEEVMPQAENQDPDIKAHVNSLGENLKTLRLRLRRCHRFLPCENGGGSGGKSKAVEQVKNAFNKLQEKGIYDAMSEFDIFINYIEAYMTMKIRN

SEQ ID NO: 948 - protein, 236 aa, synthetic construct; identical to SEQ ID NO: 944
  REGION 1..236: note = Synthetic

SEQ ID NO: 949 - protein, 644 aa, synthetic construct
  REGION 1..644: note = Synthetic
MDMRVPAQLLGLLLLWLRGARCQVQLVQSGAEVKKPGASVKVSCKASGYTFTRYDINWVRQATGQGLEWMGWLNPNSGNTGQTQKFRGRVTMTRDTSINTAYMELSSLRSEDTAVYYCARGGYTSAWRWYFDLWGRGTLVTVSSASTKGPSVFPLAPSSKSTSGGTAALGCLVKDYFPEPVTVSWNSGALTSGVHTFPAVLQSSGLYSLSSVVTVPSSSLGTQTYICNVNHKPSNTKVDKKVEPKSCDKTHTCPPCPAPELLGGPSVFLFPPKPKDTLMISRTPEVTCVVVDVSHEDPEVKFNWYVDGVEVHNAKTKPCEEQYGSTYRCVSVLTVLHQDWLNGKEYKCKVSNKALPAPIEKTISKAKGQPREPQVYTLPPSREEMTKNQVSLTCLVKGFYPSDIAVEWESNGQPENNYKTTPPVLDSDGSFFLYSKLTVDKSRWQQGNVFSCSVMHEALHNHYTQKSLSLSPGGGGGSSPGQGTQSENSCTHFPGNLPNMLRDLRDAFSRVKTFFQMKGQLDNLLLKESLLEDFKGYLGCQALSEMIQFYLEEVMPQAENQDPDIKAHVNSLGENLKTLRLRLRRCHRFLPCENGGGSGGKSKAVEQVKNAFNKLQEKGIYKAMSEFDIFINYIEAYMTMKIRN

SEQ ID NO: 950 - protein, 236 aa, synthetic construct; identical to SEQ ID NO: 944
  REGION 1..236: note = Synthetic

SEQ ID NO: 951 - protein, 644 aa, synthetic construct
  REGION 1..644: note = Synthetic
MDMRVPAQLLGLLLLWLRGARCQVQLVQSGAEVKKPGASVKVSCKASGYTFTRYDINWVRQATGQGLEWMGWLNPNSGNTGQTQKFRGRVTMTRDTSINTAYMELSSLRSEDTAVYYCARGGYTSAWRWYFDLWGRGTLVTVSSASTKGPSVFPLAPSSKSTSGGTAALGCLVKDYFPEPVTVSWNSGALTSGVHTFPAVLQSSGLYSLSSVVTVPSSSLGTQTYICNVNHKPSNTKVDKKVEPKSCDKTHTCPPCPAPELLGGPSVFLFPPKPKDTLMISRTPEVTCVVVDVSHEDPEVKFNWYVDGVEVHNAKTKPCEEQYGSTYRCVSVLTVLHQDWLNGKEYKCKVSNKALPAPIEKTISKAKGQPREPQVYTLPPSREEMTKNQVSLTCLVKGFYPSDIAVEWESNGQPENNYKTTPPVLDSDGSFFLYSKLTVDKSRWQQGNVFSCSVMHEALHNHYTQKSLSLSPGGGGGSSPGQGTQSENSCTHFPGNLPNMLRDLRDAFSRVKTFFRMKDQLDNLLLKESLLEDFKGYLGCQALSEMIQFYLEEVMPQAENQDPDIKAHVNSLGENLKTLRLRLRRCHRFLPCENGGGSGGKSKAVEQVKNAFNKLQEKGIYKAMSEFDIFINYIEAYMTMKIRN

SEQ ID NO: 952 - protein, 236 aa, synthetic construct; identical to SEQ ID NO: 944
  REGION 1..236: note = Synthetic

SEQ ID NO: 953 - protein, 644 aa, synthetic construct
  REGION 1..644: note = Synthetic
MDMRVPAQLLGLLLLWLRGARCQVQLVQSGAEVKKPGASVKVSCKASGYTFTRYDINWVRQATGQGLEWMGWLNPNSGNTGQTQKFRGRVTMTRDTSINTAYMELSSLRSEDTAVYYCARGGYTSAWRWYFDLWGRGTLVTVSSASTKGPSVFPLAPSSKSTSGGTAALGCLVKDYFPEPVTVSWNSGALTSGVHTFPAVLQSSGLYSLSSVVTVPSSSLGTQTYICNVNHKPSNTKVDKKVEPKSCDKTHTCPPCPAPELLGGPSVFLFPPKPKDTLMISRTPEVTCVVVDVSHEDPEVKFNWYVDGVEVHNAKTKPCEEQYGSTYRCVSVLTVLHQDWLNGKEYKCKVSNKALPAPIEKTISKAKGQPREPQVYTLPPSREEMTKNQVSLTCLVKGFYPSDIAVEWESNGQPENNYKTTPPVLDSDGSFFLYSKLTVDKSRWQQGNVFSCSVMHEALHNHYTQKSLSLSPGGGGGSSPGQGTQSENSCTHFPGNLPNMLRDLRDAFSRVKTFFQMKDQLDNKLLKESLLEDFKGYLGCQALSEMIQFYLEEVMPQAENQDPDIKAHVNSLGENLKTLRLRLRRCHRFLPCENGGGSGGKSKAVEQVKNAFNKLQEKGIYKAMSEFDIFINYIEAYMTMKIRN

SEQ ID NO: 954 - protein, 236 aa, synthetic construct; identical to SEQ ID NO: 944
  REGION 1..236: note = Synthetic

SEQ ID NO: 955 - protein, 644 aa, synthetic construct
  REGION 1..644: note = Synthetic
MDMRVPAQLLGLLLLWLRGARCQVQLVQSGAEVKKPGASVKVSCKASGYTFTRYDINWVRQATGQGLEWMGWLNPNSGNTGQTQKFRGRVTMTRDTSINTAYMELSSLRSEDTAVYYCARGGYTSAWRWYFDLWGRGTLVTVSSASTKGPSVFPLAPSSKSTSGGTAALGCLVKDYFPEPVTVSWNSGALTSGVHTFPAVLQSSGLYSLSSVVTVPSSSLGTQTYICNVNHKPSNTKVDKKVEPKSCDKTHTCPPCPAPELLGGPSVFLFPPKPKDTLMISRTPEVTCVVVDVSHEDPEVKFNWYVDGVEVHNAKTKPCEEQYGSTYRCVSVLTVLHQDWLNGKEYKCKVSNKALPAPIEKTISKAKGQPREPQVYTLPPSREEMTKNQVSLTCLVKGFYPSDIAVEWESNGQPENNYKTTPPVLDSDGSFFLYSKLTVDKSRWQQGNVFSCSVMHEALHNHYTQKSLSLSPGGGGGSSPGQGTQSENSCTHFPGNLPNMLRDLRDAFSRVDTFFQMKDQLDNLLLKESLLEDFKGYLGCQALSEMIQFYLEEVMPQAENQDPDIKAHVNSLGENLKTLRLRLRRCHRFLPCENGGGSGGKSKAVEQVKNAFNKLQEKGIYKAMSEFDIFINYIEAYMTMKIRN

SEQ ID NO: 956 - protein, 236 aa, synthetic construct; identical to SEQ ID NO: 944
  REGION 1..236: note = Synthetic

SEQ ID NO: 957 - protein, 644 aa, synthetic construct
  REGION 1..644: note = Synthetic
MDMRVPAQLLGLLLLWLRGARCQVQLVQSGAEVKKPGASVKVSCKASGYTFTRYDINWVRQATGQGLEWMGWLNPNSGNTGQTQKFRGRVTMTRDTSINTAYMELSSLRSEDTAVYYCARGGYTSAWRWYFDLWGRGTLVTVSSASTKGPSVFPLAPSSKSTSGGTAALGCLVKDYFPEPVTVSWNSGALTSGVHTFPAVLQSSGLYSLSSVVTVPSSSLGTQTYICNVNHKPSNTKVDKKVEPKSCDKTHTCPPCPAPELLGGPSVFLFPPKPKDTLMISRTPEVTCVVVDVSHEDPEVKFNWYVDGVEVHNAKTKPCEEQYGSTYRCVSVLTVLHQDWLNGKEYKCKVSNKALPAPIEKTISKAKGQPREPQVYTLPPSREEMTKNQVSLTCLVKGFYPSDIAVEWESNGQPENNYKTTPPVLDSDGSFFLYSKLTVDKSRWQQGNVFSCSVMHEALHNHYTQKSLSLSPGGGGGSSPGQGTQSENSCTHFPGNLPNMLRDLRDAFSRVKTFFEMKDQLDNLLLKESLLEDFKGYLGCQALSEMIQFYLEEVMPQAENQDPDIKAHVNSLGENLKTLRLRLRRCHRFLPCENGGGSGGKSKAVEQVKNAFNKLQEKGIYKAMSEFDIFINYIEAYMTMKIRN

SEQ ID NO: 958 - protein, 236 aa, synthetic construct; identical to SEQ ID NO: 944
  REGION 1..236: note = Synthetic

SEQ ID NO: 959 - protein, 645 aa, synthetic construct
  REGION 1..645: note = Synthetic
MDMRVPAQLLGLLLLWLRGARCQVQLVQSGAEVKKPGASVKVSCKASGYTFTSYDINWVRQATGQGLEWMGWMNPNSGNSGSVKKFRDRVTMTRDTSISTAYMELSSLRSEDTAVYYCVRLIGYSSAWKWSFQHWGQGTLVTVSSASTKGPSVFPLAPSSKSTSGGTAALGCLVKDYFPEPVTVSWNSGALTSGVHTFPAVLQSSGLYSLSSVVTVPSSSLGTQTYICNVNHKPSNTKVDKKVEPKSCDKTHTCPPCPAPELLGGPSVFLFPPKPKDTLMISRTPEVTCVVVDVSHEDPEVKFNWYVDGVEVHNAKTKPCEEQYGSTYRCVSVLTVLHQDWLNGKEYKCKVSNKALPAPIEKTISKAKGQPREPQVYTLPPSREEMTKNQVSLTCLVKGFYPSDIAVEWESNGQPENNYKTTPPVLDSDGSFFLYSKLTVDKSRWQQGNVFSCSVMHEALHNHYTQKSLSLSPGGGGGSSPGQGTQSENSCTHFPGNLPNMLRDLLDAFSRVKTFFQMKDQLDNLLLKESLLEDFKGYLGCQALSEMIQFYLEEVMPQAENQDPDIKAHVNSLGENLKTLRLRLRRCHRFLPCENGGGSGGKSKAVEQVKNAFNKLQEKGIYKAMSEFDIFINYIEAYMTMKIRN

SEQ ID NO: 960 - protein, 236 aa, synthetic construct; identical to SEQ ID NO: 85
  REGION 1..236: note = Synthetic

SEQ ID NO: 961 - protein, 645 aa, synthetic construct
  REGION 1..645: note = Synthetic
MDMRVPAQLLGLLLLWLRGARCQVQLVQSGAEVKKPGASVKVSCKASGYTFTSYDINWVRQATGQGLEWMGWMNPNSGNSGSVKKFRDRVTMTRDTSISTAYMELSSLRSEDTAVYYCVRLIGYSSAWKWSFQHWGQGTLVTVSSASTKGPSVFPLAPSSKSTSGGTAALGCLVKDYFPEPVTVSWNSGALTSGVHTFPAVLQSSGLYSLSSVVTVPSSSLGTQTYICNVNHKPSNTKVDKKVEPKSCDKTHTCPPCPAPELLGGPSVFLFPPKPKDTLMISRTPEVTCVVVDVSHEDPEVKFNWYVDGVEVHNAKTKPCEEQYGSTYRCVSVLTVLHQDWLNGKEYKCKVSNKALPAPIEKTISKAKGQPREPQVYTLPPSREEMTKNQVSLTCLVKGFYPSDIAVEWESNGQPENNYKTTPPVLDSDGSFFLYSKLTVDKSRWQQGNVFSCSVMHEALHNHYTQKSLSLSPGGGGGSSPGQGTQSENSCTHFPGNLPNMLRDLRDAFSRVKTFFQMKDQLDNLLLKESLLEDFKGYLGCQALSEMIQFYLEEVMPQAENQDPDIKAHVNSLGENLKTLRLRLRRCHRFLPCENGGGSGGKSKAVEQVKNAFNKLQEKGIYLAMSEFDIFINYIEAYMTMKIRN

SEQ ID NO: 962 - protein, 236 aa, synthetic construct; identical to SEQ ID NO: 85
  REGION 1..236: note = Synthetic

SEQ ID NO: 963 - protein, 645 aa, synthetic construct
  REGION 1..645: note = Synthetic
MDMRVPAQLLGLLLLWLRGARCQVQLVQSGAEVKKPGASVKVSCKASGYTFTSYDINWVRQATGQGLEWMGWMNPNSGNSGSVKKFRDRVTMTRDTSISTAYMELSSLRSEDTAVYYCVRLIGYSSAWKWSFQHWGQGTLVTVSSASTKGPSVFPLAPSSKSTSGGTAALGCLVKDYFPEPVTVSWNSGALTSGVHTFPAVLQSSGLYSLSSVVTVPSSSLGTQTYICNVNHKPSNTKVDKKVEPKSCDKTHTCPPCPAPELLGGPSVFLFPPKPKDTLMISRTPEVTCVVVDVSHEDPEVKFNWYVDGVEVHNAKTKPCEEQYGSTYRCVSVLTVLHQDWLNGKEYKCKVSNKALPAPIEKTISKAKGQPREPQVYTLPPSREEMTKNQVSLTCLVKGFYPSDIAVEWESNGQPENNYKTTPPVLDSDGSFFLYSKLTVDKSRWQQGNVFSCSVMHEALHNHYTQKSLSLSPGGGGGSSPGQGTQSENSCTHFPGNLPNMLRDLRDAFSRVKTFFQMKDQLDNLLLKESLLEDFKGYLGCQALSEMIQFYLEEVMPQAENQDPDIKAHVNSLGENLKTLRLRLRRCHRFLPCENGGGSGGKSKAVEQVKNAFNKLQEKGIYDAMSEFDIFINYIEAYMTMKIRN

SEQ ID NO: 964 - protein, 236 aa, synthetic construct; identical to SEQ ID NO: 85
  REGION 1..236: note = Synthetic

SEQ ID NO: 965 - protein, 645 aa, synthetic construct
  REGION 1..645: note = Synthetic
MDMRVPAQLLGLLLLWLRGARCQVQLVQSGAEVKKPGASVKVSCKASGYTFTSYDINWVRQATGQGLEWMGWMNPNSGNSGSVKKFRDRVTMTRDTSISTAYMELSSLRSEDTAVYYCVRLIGYSSAWKWSFQHWGQGTLVTVSSASTKGPSVFPLAPSSKSTSGGTAALGCLVKDYFPEPVTVSWNSGALTSGVHTFPAVLQSSGLYSLSSVVTVPSSSLGTQTYICNVNHKPSNTKVDKKVEPKSCDKTHTCPPCPAPELLGGPSVFLFPPKPKDTLMISRTPEVTCVVVDVSHEDPEVKFNWYVDGVEVHNAKTKPCEEQYGSTYRCVSVLTVLHQDWLNGKEYKCKVSNKALPAPIEKTISKAKGQPREPQVYTLPPSREEMTKNQVSLTCLVKGFYPSDIAVEWESNGQPENNYKTTPPVLDSDGSFFLYSKLTVDKSRWQQGNVFSCSVMHEALHNHYTQKSLSLSPGGGGGSSPGQGTQSENSCTHFPGNLPNMLRDLRDAFSRVKTFFQMKGQLDNLLLKESLLEDFKGYLGCQALSEMIQFYLEEVMPQAENQDPDIKAHVNSLGENLKTLRLRLRRCHRFLPCENGGGSGGKSKAVEQVKNAFNKLQEKGIYKAMSEFDIFINYIEAYMTMKIRN

SEQ ID NO: 966 - protein, 236 aa, synthetic construct; identical to SEQ ID NO: 85
  REGION 1..236: note = Synthetic

SEQ ID NO: 967 - protein, 645 aa, synthetic construct
  REGION 1..645: note = Synthetic
MDMRVPAQLLGLLLLWLRGARCQVQLVQSGAEVKKPGASVKVSCKASGYTFTSYDINWVRQATGQGLEWMGWMNPNSGNSGSVKKFRDRVTMTRDTSISTAYMELSSLRSEDTAVYYCVRLIGYSSAWKWSFQHWGQGTLVTVSSASTKGPSVFPLAPSSKSTSGGTAALGCLVKDYFPEPVTVSWNSGALTSGVHTFPAVLQSSGLYSLSSVVTVPSSSLGTQTYICNVNHKPSNTKVDKKVEPKSCDKTHTCPPCPAPELLGGPSVFLFPPKPKDTLMISRTPEVTCVVVDVSHEDPEVKFNWYVDGVEVHNAKTKPCEEQYGSTYRCVSVLTVLHQDWLNGKEYKCKVSNKALPAPIEKTISKAKGQPREPQVYTLPPSREEMTKNQVSLTCLVKGFYPSDIAVEWESNGQPENNYKTTPPVLDSDGSFFLYSKLTVDKSRWQQGNVFSCSVMHEALHNHYTQKSLSLSPGGGGGSSPGQGTQSENSCTHFPGNLPNMLRDLRDAFSRVKTFFRMKDQLDNLLLKESLLEDFKGYLGCQALSEMIQFYLEEVMPQAENQDPDIKAHVNSLGENLKTLRLRLRRCHRFLPCENGGGSGGKSKAVEQVKNAFNKLQEKGIYKAMSEFDIFINYIEAYMTMKIRN

SEQ ID NO: 968 - protein, 236 aa, synthetic construct; identical to SEQ ID NO: 85
  REGION 1..236: note = Synthetic

SEQ ID NO: 969 - protein, 645 aa, synthetic construct
  REGION 1..645: note = Synthetic
MDMRVPAQLLGLLLLWLRGARCQVQLVQSGAEVKKPGASVKVSCKASGYTFTSYDINWVRQATGQGLEWMGWMNPNSGNSGSVKKFRDRVTMTRDTSISTAYMELSSLRSEDTAVYYCVRLIGYSSAWKWSFQHWGQGTLVTVSSASTKGPSVFPLAPSSKSTSGGTAALGCLVKDYFPEPVTVSWNSGALTSGVHTFPAVLQSSGLYSLSSVVTVPSSSLGTQTYICNVNHKPSNTKVDKKVEPKSCDKTHTCPPCPAPELLGGPSVFLFPPKPKDTLMISRTPEVTCVVVDVSHEDPEVKFNWYVDGVEVHNAKTKPCEEQYGSTYRCVSVLTVLHQDWLNGKEYKCKVSNKALPAPIEKTISKAKGQPREPQVYTLPPSREEMTKNQVSLTCLVKGFYPSDIAVEWESNGQPENNYKTTPPVLDSDGSFFLYSKLTVDKSRWQQGNVFSCSVMHEALHNHYTQKSLSLSPGGGGGSSPGQGTQSENSCTHFPGNLPNMLRDLRDAFSRVKTFFQMKDQLDNKLLKESLLEDFKGYLGCQALSEMIQFYLEEVMPQAENQDPDIKAHVNSLGENLKTLRLRLRRCHRFLPCENGGGSGGKSKAVEQVKNAFNKLQEKGIYKAMSEFDIFINYIEAYMTMKIRN

SEQ ID NO: 970 - protein, 236 aa, synthetic construct; identical to SEQ ID NO: 85
  REGION 1..236: note = Synthetic

SEQ ID NO: 971 - protein, 645 aa, synthetic construct
  REGION 1..645: note = Synthetic
MDMRVPAQLLGLLLLWLRGARCQVQLVQSGAEVKKPGASVKVSCKASGYTFTSYDINWVRQATGQGLEWMGWMNPNSGNSGSVKKFRDRVTMTRDTSISTAYMELSSLRSEDTAVYYCVRLIGYSSAWKWSFQHWGQGTLVTVSSASTKGPSVFPLAPSSKSTSGGTAALGCLVKDYFPEPVTVSWNSGALTSGVHTFPAVLQSSGLYSLSSVVTVPSSSLGTQTYICNVNHKPSNTKVDKKVEPKSCDKTHTCPPCPAPELLGGPSVFLFPPKPKDTLMISRTPEVTCVVVDVSHEDPEVKFNWYVDGVEVHNAKTKPCEEQYGSTYRCVSVLTVLHQDWLNGKEYKCKVSNKALPAPIEKTISKAKGQPREPQVYTLPPSREEMTKNQVSLTCLVKGFYPSDIAVEWESNGQPENNYKTTPPVLDSDGSFFLYSKLTVDKSRWQQGNVFSCSVMHEALHNHYTQKSLSLSPGGGGGSSPGQGTQSENSCTHFPGNLPNMLRDLRDAFSRVDTFFQMKDQLDNLLLKESLLEDFKGYLGCQALSEMIQFYLEEVMPQAENQDPDIKAHVNSLGENLKTLRLRLRRCHRFLPCENGGGSGGKSKAVEQVKNAFNKLQEKGIYKAMSEFDIFINYIEAYMTMKIRN

SEQ ID NO: 972 - protein, 236 aa, synthetic construct; identical to SEQ ID NO: 85
  REGION 1..236: note = Synthetic

SEQ ID NO: 973 - protein, 645 aa, synthetic construct
  REGION 1..645: note = Synthetic
MDMRVPAQLLGLLLLWLRGARCQVQLVQSGAEVKKPGASVKVSCKASGYTFTSYDINWVRQATGQGLEWMGWMNPNSGNSGSVKKFRDRVTMTRDTSISTAYMELSSLRSEDTAVYYCVRLIGYSSAWKWSFQHWGQGTLVTVSSASTKGPSVFPLAPSSKSTSGGTAALGCLVKDYFPEPVTVSWNSGALTSGVHTFPAVLQSSGLYSLSSVVTVPSSSLGTQTYICNVNHKPSNTKVDKKVEPKSCDKTHTCPPCPAPELLGGPSVFLFPPKPKDTLMISRTPEVTCVVVDVSHEDPEVKFNWYVDGVEVHNAKTKPCEEQYGSTYRCVSVLTVLHQDWLNGKEYKCKVSNKALPAPIEKTISKAKGQPREPQVYTLPPSREEMTKNQVSLTCLVKGFYPSDIAVEWESNGQPENNYKTTPPVLDSDGSFFLYSKLTVDKSRWQQGNVFSCSVMHEALHNHYTQKSLSLSPGGGGGSSPGQGTQSENSCTHFPGNLPNMLRDLRDAFSRVKTFFEMKDQLDNLLLKESLLEDFKGYLGCQALSEMIQFYLEEVMPQAENQDPDIKAHVNSLGENLKTLRLRLRRCHRFLPCENGGGSGGKSKAVEQVKNAFNKLQEKGIYKAMSEFDIFINYIEAYMTMKIRN

SEQ ID NO: 974 - protein, 236 aa, synthetic construct; identical to SEQ ID NO: 85
  REGION 1..236: note = Synthetic

SEQ ID NO: 975 - protein, 644 aa, synthetic construct
  REGION 1..644: note = Synthetic
MDMRVPAQLLGLLLLWLRGARCQVQLVQSGAEVKKPGASVKVSCKASGYTFTSYDINWVRQATGQGLEWMGRMNPKSGNAGYVQNFRGRVTMTRDTSISTAYMELSSLRSEDTAVYYCARGGRTSIWSFVFDYWGQGTLVTVSSASTKGPSVFPLAPSSKSTSGGTAALGCLVKDYFPEPVTVSWNSGALTSGVHTFPAVLQSSGLYSLSSVVTVPSSSLGTQTYICNVNHKPSNTKVDKKVEPKSCDKTHTCPPCPAPELLGGPSVFLFPPKPKDTLMISRTPEVTCVVVDVSHEDPEVKFNWYVDGVEVHNAKTKPCEEQYGSTYRCVSVLTVLHQDWLNGKEYKCKVSNKALPAPIEKTISKAKGQPREPQVYTLPPSREEMTKNQVSLTCLVKGFYPSDIAVEWESNGQPENNYKTTPPVLDSDGSFFLYSKLTVDKSRWQQGNVFSCSVMHEALHNHYTQKSLSLSPGGGGGSSPGQGTQSENSCTHFPGNLPNMLRDLLDAFSRVKTFFQMKDQLDNLLLKESLLEDFKGYLGCQALSEMIQFYLEEVMPQAENQDPDIKAHVNSLGENLKTLRLRLRRCHRFLPCENGGGSGGKSKAVEQVKNAFNKLQEKGIYKAMSEFDIFINYIEAYMTMKIRN

SEQ ID NO: 976 - protein, 236 aa, synthetic construct; identical to SEQ ID NO: 65
  REGION 1..236: note = Synthetic

SEQ ID NO: 977 - protein, 644 aa, synthetic construct
  REGION 1..644: note = Synthetic
MDMRVPAQLLGLLLLWLRGARCQVQLVQSGAEVKKPGASVKVSCKASGYTFTSYDINWVRQATGQGLEWMGRMNPKSGNAGYVQNFRGRVTMTRDTSISTAYMELSSLRSEDTAVYYCARGGRTSIWSFVFDYWGQGTLVTVSSASTKGPSVFPLAPSSKSTSGGTAALGCLVKDYFPEPVTVSWNSGALTSGVHTFPAVLQSSGLYSLSSVVTVPSSSLGTQTYICNVNHKPSNTKVDKKVEPKSCDKTHTCPPCPAPELLGGPSVFLFPPKPKDTLMISRTPEVTCVVVDVSHEDPEVKFNWYVDGVEVHNAKTKPCEEQYGSTYRCVSVLTVLHQDWLNGKEYKCKVSNKALPAPIEKTISKAKGQPREPQVYTLPPSREEMTKNQVSLTCLVKGFYPSDIAVEWESNGQPENNYKTTPPVLDSDGSFFLYSKLTVDKSRWQQGNVFSCSVMHEALHNHYTQKSLSLSPGGGGGSSPGQGTQSENSCTHFPGNLPNMLRDLRDAFSRVKTFFQMKDQLDNLLLKESLLEDFKGYLGCQALSEMIQFYLEEVMPQAENQDPDIKAHVNSLGENLKTLRLRLRRCHRFLPCENGGGSGGKSKAVEQVKNAFNKLQEKGIYLAMSEFDIFINYIEAYMTMKIRN

SEQ ID NO: 978 - protein, 236 aa, synthetic construct; identical to SEQ ID NO: 65
  REGION 1..236: note = Synthetic

SEQ ID NO: 979 - protein, 644 aa, synthetic construct
  REGION 1..644: note = Synthetic
MDMRVPAQLLGLLLLWLRGARCQVQLVQSGAEVKKPGASVKVSCKASGYTFTSYDINWVRQATGQGLEWMGRMNPKSGNAGYVQNFRGRVTMTRDTSISTAYMELSSLRSEDTAVYYCARGGRTSIWSFVFDYWGQGTLVTVSSASTKGPSVFPLAPSSKSTSGGTAALGCLVKDYFPEPVTVSWNSGALTSGVHTFPAVLQSSGLYSLSSVVTVPSSSLGTQTYICNVNHKPSNTKVDKKVEPKSCDKTHTCPPCPAPELLGGPSVFLFPPKPKDTLMISRTPEVTCVVVDVSHEDPEVKFNWYVDGVEVHNAKTKPCEEQYGSTYRCVSVLTVLHQDWLNGKEYKCKVSNKALPAPIEKTISKAKGQPREPQVYTLPPSREEMTKNQVSLTCLVKGFYPSDIAVEWESNGQPENNYKTTPPVLDSDGSFFLYSKLTVDKSRWQQGNVFSCSVMHEALHNHYTQKSLSLSPGGGGGSSPGQGTQSENSCTHFPGNLPNMLRDLRDAFSRVKTFFQMKDQLDNLLLKESLLEDFKGYLGCQALSEMIQFYLEEVMPQAENQDPDIKAHVNSLGENLKTLRLRLRRCHRFLPCENGGGSGGKSKAVEQVKNAFNKLQEKGIYDAMSEFDIFINYIEAYMTMKIRN

SEQ ID NO: 980 - protein, 236 aa, synthetic construct; identical to SEQ ID NO: 65
  REGION 1..236: note = Synthetic

SEQ ID NO: 981 - protein, 644 aa, synthetic construct
  REGION 1..644: note = Synthetic
MDMRVPAQLLGLLLLWLRGARCQVQLVQSGAEVKKPGASVKVSCKASGYTFTSYDINWVRQATGQGLEWMGRMNPKSGNAGYVQNFRGRVTMTRDTSISTAYMELSSLRSEDTAVYYCARGGRTSIWSFVFDYWGQGTLVTVSSASTKGPSVFPLAPSSKSTSGGTAALGCLVKDYFPEPVTVSWNSGALTSGVHTFPAVLQSSGLYSLSSVVTVPSSSLGTQTYICNVNHKPSNTKVDKKVEPKSCDKTHTCPPCPAPELLGGPSVFLFPPKPKDTLMISRTPEVTCVVVDVSHEDPEVKFNWYVDGVEVHNAKTKPCEEQYGSTYRCVSVLTVLHQDWLNGKEYKCKVSNKALPAPIEKTISKAKGQPREPQVYTLPPSREEMTKNQVSLTCLVKGFYPSDIAVEWESNGQPENNYKTTPPVLDSDGSFFLYSKLTVDKSRWQQGNVFSCSVMHEALHNHYTQKSLSLSPGGGGGSSPGQGTQSENSCTHFPGNLPNMLRDLRDAFSRVKTFFQMKGQLDNLLLKESLLEDFKGYLGCQALSEMIQFYLEEVMPQAENQDPDIKAHVNSLGENLKTLRLRLRRCHRFLPCENGGGSGGKSKAVEQVKNAFNKLQEKGIYKAMSEFDIFINYIEAYMTMKIRN

SEQ ID NO: 982 - protein, 236 aa, synthetic construct; identical to SEQ ID NO: 65
  REGION 1..236: note = Synthetic

SEQ ID NO: 983 - protein, 644 aa, synthetic construct
  REGION 1..644: note = Synthetic
MDMRVPAQLLGLLLLWLRGARCQVQLVQSGAEVKKPGASVKVSCKASGYTFTSYDINWVRQATGQGLEWMGRMNPKSGNAGYVQNFRGRVTMTRDTSISTAYMELSSLRSEDTAVYYCARGGRTSIWSFVFDYWGQGTLVTVSSASTKGPSVFPLAPSSKSTSGGTAALGCLVKDYFPEPVTVSWNSGALTSGVHTFPAVLQSSGLYSLSSVVTVPSSSLGTQTYICNVNHKPSNTKVDKKVEPKSCDKTHTCPPCPAPELLGGPSVFLFPPKPKDTLMISRTPEVTCVVVDVSHEDPEVKFNWYVDGVEVHNAKTKPCEEQYGSTYRCVSVLTVLHQDWLNGKEYKCKVSNKALPAPIEKTISKAKGQPREPQVYTLPPSREEMTKNQVSLTCLVKGFYPSDIAVEWESNGQPENNYKTTPPVLDSDGSFFLYSKLTVDKSRWQQGNVFSCSVMHEALHNHYTQKSLSLSPGGGGGSSPGQGTQSENSCTHFPGNLPNMLRDLRDAFSRVKTFFRMKDQLDNLLLKESLLEDFKGYLGCQALSEMIQFYLEEVMPQAENQDPDIKAHVNSLGENLKTLRLRLRRCHRFLPCENGGGSGGKSKAVEQVKNAFNKLQEKGIYKAMSEFDIFINYIEAYMTMKIRN

SEQ ID NO: 984 - protein, 236 aa, synthetic construct; identical to SEQ ID NO: 65
  REGION 1..236: note = Synthetic

SEQ ID NO: 985 - protein, 644 aa, synthetic construct
  REGION 1..644: note = Synthetic
MDMRVPAQLLGLLLLWLRGARCQVQLVQSGAEVKKPGASVKVSCKASGYTFTSYDINWVRQATGQGLEWMGRMNPKSGNAGYVQNFRGRVTMTRDTSISTAYMELSSLRSEDTAVYYCARGGRTSIWSFVFDYWGQGTLVTVSSASTKGPSVFPLAPSSKSTSGGTAALGCLVKDYFPEPVTVSWNSGALTSGVHTFPAVLQSSGLYSLSSVVTVPSSSLGTQTYICNVNHKPSNTKVDKKVEPKSCDKTHTCPPCPAPELLGGPSVFLFPPKPKDTLMISRTPEVTCVVVDVSHEDPEVKFNWYVDGVEVHNAKTKPCEEQYGSTYRCVSVLTVLHQDWLNGKEYKCKVSNKALPAPIEKTISKAKGQPREPQVYTLPPSREEMTKNQVSLTCLVKGFYPSDIAVEWESNGQPENNYKTTPPVLDSDGSFFLYSKLTVDKSRWQQGNVFSCSVMHEALHNHYTQKSLSLSPGGGGGSSPGQGTQSENSCTHFPGNLPNMLRDLRDAFSRVKTFFQMKDQLDNKLLKESLLEDFKGYLGCQALSEMIQFYLEEVMPQAENQDPDIKAHVNSLGENLKTLRLRLRRCHRFLPCENGGGSGGKSKAVEQVKNAFNKLQEKGIYKAMSEFDIFINYIEAYMTMKIRN

SEQ ID NO: 986 - protein, 236 aa, synthetic construct; identical to SEQ ID NO: 65
  REGION 1..236: note = Synthetic

SEQ ID NO: 987 - protein, 644 aa, synthetic construct
  REGION 1..644: note = Synthetic
MDMRVPAQLLGLLLLWLRGARCQVQLVQSGAEVKKPGASVKVSCKASGYTFTSYDINWVRQATGQGLEWMGRMNPKSGNAGYVQNFRGRVTMTRDTSISTAYMELSSLRSEDTAVYYCARGGRTSIWSFVFDYWGQGTLVTVSSASTKGPSVFPLAPSSKSTSGGTAALGCLVKDYFPEPVTVSWNSGALTSGVHTFPAVLQSSGLYSLSSVVTVPSSSLGTQTYICNVNHKPSNTKVDKKVEPKSCDKTHTCPPCPAPELLGGPSVFLFPPKPKDTLMISRTPEVTCVVVDVSHEDPEVKFNWYVDGVEVHNAKTKPCEEQYGSTYRCVSVLTVLHQDWLNGKEYKCKVSNKALPAPIEKTISKAKGQPREPQVYTLPPSREEMTKNQVSLTCLVKGFYPSDIAVEWESNGQPENNYKTTPPVLDSDGSFFLYSKLTVDKSRWQQGNVFSCSVMHEALHNHYTQKSLSLSPGGGGGSSPGQGTQSENSCTHFPGNLPNMLRDLRDAFSRVDTFFQMKDQLDNLLLKESLLEDFKGYLGCQALSEMIQFYLEEVMPQAENQDPDIKAHVNSLGENLKTLRLRLRRCHRFLPCENGGGSGGKSKAVEQVKNAFNKLQEKGIYKAMSEFDIFINYIEAYMTMKIRN

SEQ ID NO: 988 - protein, 236 aa, synthetic construct; identical to SEQ ID NO: 65
  REGION 1..236: note = Synthetic

SEQ ID NO: 989 - protein, 644 aa, synthetic construct
  REGION 1..644: note = Synthetic
MDMRVPAQLLGLLLLWLRGARCQVQLVQSGAEVKKPGASVKVSCKASGYTFTSYDINWVRQATGQGLEWMGRMNPKSGNAGYVQNFRGRVTMTRDTSISTAYMELSSLRSEDTAVYYCARGGRTSIWSFVFDYWGQGTLVTVSSASTKGPSVFPLAPSSKSTSGGTAALGCLVKDYFPEPVTVSWNSGALTSGVHTFPAVLQSSGLYSLSSVVTVPSSSLGTQTYICNVNHKPSNTKVDKKVEPKSCDKTHTCPPCPAPELLGGPSVFLFPPKPKDTLMISRTPEVTCVVVDVSHEDPEVKFNWYVDGVEVHNAKTKPCEEQYGSTYRCVSVLTVLHQDWLNGKEYKCKVSNKALPAPIEKTISKAKGQPREPQVYTLPPSREEMTKNQVSLTCLVKGFYPSDIAVEWESNGQPENNYKTTPPVLDSDGSFFLYSKLTVDKSRWQQGNVFSCSVMHEALHNHYTQKSLSLSPGGGGGSSPGQGTQSENSCTHFPGNLPNMLRDLRDAFSRVKTFFEMKDQLDNLLLKESLLEDFKGYLGCQALSEMIQFYLEEVMPQAENQDPDIKAHVNSLGENLKTLRLRLRRCHRFLPCENGGGSGGKSKAVEQVKNAFNKLQEKGIYKAMSEFDIFINYIEAYMTMKIRN

SEQ ID NO: 990 - protein, 236 aa, synthetic construct; identical to SEQ ID NO: 65
  REGION 1..236: note = Synthetic

SEQ ID NO: 991 - protein, 646 aa, synthetic construct
  REGION 1..646: note = Synthetic
MDMRVPAQLLGLLLLWLRGARCQVQLVQSGAEVKKPGASVKVSCKASGYTFTSYDINWVRQATGQGLEWMGWMNPNRGNTGYVKKFQGRVTMTRDTSISTAYMELSSLRSEDTAVYYCARRRAVYRSSWEWYFDLWGRGTLVTVSSASTKGPSVFPLAPSSKSTSGGTAALGCLVKDYFPEPVTVSWNSGALTSGVHTFPAVLQSSGLYSLSSVVTVPSSSLGTQTYICNVNHKPSNTKVDKKVEPKSCDKTHTCPPCPAPELLGGPSVFLFPPKPKDTLMISRTPEVTCVVVDVSHEDPEVKFNWYVDGVEVHNAKTKPCEEQYGSTYRCVSVLTVLHQDWLNGKEYKCKVSNKALPAPIEKTISKAKGQPREPQVYTLPPSREEMTKNQVSLTCLVKGFYPSDIAVEWESNGQPENNYKTTPPVLDSDGSFFLYSKLTVDKSRWQQGNVFSCSVMHEALHNHYTQKSLSLSPGGGGGSSPGQGTQSENSCTHFPGNLPNMLRDLLDAFSRVKTFFQMKDQLDNLLLKESLLEDFKGYLGCQALSEMIQFYLEEVMPQAENQDPDIKAHVNSLGENLKTLRLRLRRCHRFLPCENGGGSGGKSKAVEQVKNAFNKLQEKGIYKAMSEFDIFINYIEAYMTMKIRN

SEQ ID NO: 992 - protein, 236 aa, synthetic construct; identical to SEQ ID NO: 45
  REGION 1..236: note = Synthetic

SEQ ID NO: 993 - protein, 646 aa, synthetic construct
  REGION 1..646: note = Synthetic
MDMRVPAQLLGLLLLWLRGARCQVQLVQSGAEVKKPGASVKVSCKASGYTFTSYDINWVRQATGQGLEWMGWMNPNRGNTGYVKKFQGRVTMTRDTSISTAYMELSSLRSEDTAVYYCARRRAVYRSSWEWYFDLWGRGTLVTVSSASTKGPSVFPLAPSSKSTSGGTAALGCLVKDYFPEPVTVSWNSGALTSGVHTFPAVLQSSGLYSLSSVVTVPSSSLGTQTYICNVNHKPSNTKVDKKVEPKSCDKTHTCPPCPAPELLGGPSVFLFPPKPKDTLMISRTPEVTCVVVDVSHEDPEVKFNWYVDGVEVHNAKTKPCEEQYGSTYRCVSVLTVLHQDWLNGKEYKCKVSNKALPAPIEKTISKAKGQPREPQVYTLPPSREEMTKNQVSLTCLVKGFYPSDIAVEWESNGQPENNYKTTPPVLDSDGSFFLYSKLTVDKSRWQQGNVFSCSVMHEALHNHYTQKSLSLSPGGGGGSSPGQGTQSENSCTHFPGNLPNMLRDLRDAFSRVKTFFQMKDQLDNLLLKESLLEDFKGYLGCQALSEMIQFYLEEVMPQAENQDPDIKAHVNSLGENLKTLRLRLRRCHRFLPCENGGGSGGKSKAVEQVKNAFNKLQEKGIYLAMSEFDIFINYIEAYMTMKIRN

SEQ ID NO: 994 - protein, 236 aa, synthetic construct; identical to SEQ ID NO: 45
  REGION 1..236: note = Synthetic

SEQ ID NO: 995 - protein, 646 aa, synthetic construct
  REGION 1..646: note = Synthetic
MDMRVPAQLLGLLLLWLRGARCQVQLVQSGAEVKKPGASVKVSCKASGYTFTSYDINWVRQATGQGLEWMGWMNPNRGNTGYVKKFQGRVTMTRDTSISTAYMELSSLRSEDTAVYYCARRRAVYRSSWEWYFDLWGRGTLVTVSSASTKGPSVFPLAPSSKSTSGGTAALGCLVKDYFPEPVTVSWNSGALTSGVHTFPAVLQSSGLYSLSSVVTVPSSSLGTQTYICNVNHKPSNTKVDKKVEPKSCDKTHTCPPCPAPELLGGPSVFLFPPKPKDTLMISRTPEVTCVVVDVSHEDPEVKFNWYVDGVEVHNAKTKPCEEQYGSTYRCVSVLTVLHQDWLNGKEYKCKVSNKALPAPIEKTISKAKGQPREPQVYTLPPSREEMTKNQVSLTCLVKGFYPSDIAVEWESNGQPENNYKTTPPVLDSDGSFFLYSKLTVDKSRWQQGNVFSCSVMHEALHNHYTQKSLSLSPGGGGGSSPGQGTQSENSCTHFPGNLPNMLRDLRDAFSRVKTFFQMKDQLDNLLLKESLLEDFKGYLGCQALSEMIQFYLEEVMPQAENQDPDIKAHVNSLGENLKTLRLRLRRCHRFLPCENGGGSGGKSKAVEQVKNAFNKLQEKGIYDAMSEFDIFINYIEAYMTMKIRN

SEQ ID NO: 996 - protein, 236 aa, synthetic construct; identical to SEQ ID NO: 45
  REGION 1..236: note = Synthetic

SEQ ID NO: 997 - protein, 646 aa, synthetic construct
  REGION 1..646: note = Synthetic
MDMRVPAQLLGLLLLWLRGARCQVQLVQSGAEVKKPGASVKVSCKASGYTFTSYDINWVRQATGQGLEWMGWMNPNRGNTGYVKKFQGRVTMTRDTSISTAYMELSSLRSEDTAVYYCARRRAVYRSSWEWYFDLWGRGTLVTVSSASTKGPSVFPLAPSSKSTSGGTAALGCLVKDYFPEPVTVSWNSGALTSGVHTFPAVLQSSGLYSLSSVVTVPSSSLGTQTYICNVNHKPSNTKVDKKVEPKSCDKTHTCPPCPAPELLGGPSVFLFPPKPKDTLMISRTPEVTCVVVDVSHEDPEVKFNWYVDGVEVHNAKTKPCEEQYGSTYRCVSVLTVLHQDWLNGKEYKCKVSNKALPAPIEKTISKAKGQPREPQVYTLPPSREEMTKNQVSLTCLVKGFYPSDIAVEWESNGQPENNYKTTPPVLDSDGSFFLYSKLTVDKSRWQQGNVFSCSVMHEALHNHYTQKSLSLSPGGGGGSSPGQGTQSENSCTHFPGNLPNMLRDLRDAFSRVKTFFQMKGQLDNLLLKESLLEDFKGYLGCQALSEMIQFYLEEVMPQAENQDPDIKAHVNSLGENLKTLRLRLRRCHRFLPCENGGGSGGKSKAVEQVKNAFNKLQEKGIYKAMSEFDIFINYIEAYMTMKIRN

SEQ ID NO: 998 - protein, 236 aa, synthetic construct; identical to SEQ ID NO: 45
  REGION 1..236: note = Synthetic

SEQ ID NO: 999 - protein, 646 aa, synthetic construct
  REGION 1..646: note = Synthetic
MDMRVPAQLLGLLLLWLRGARCQVQLVQSGAEVKKPGASVKVSCKASGYTFTSYDINWVRQATGQGLEWMGWMNPNRGNTGYVKKFQGRVTMTRDTSISTAYMELSSLRSEDTAVYYCARRRAVYRSSWEWYFDLWGRGTLVTVSSASTKGPSVFPLAPSSKSTSGGTAALGCLVKDYFPEPVTVSWNSGALTSGVHTFPAVLQSSGLYSLSSVVTVPSSSLGTQTYICNVNHKPSNTKVDKKVEPKSCDKTHTCPPCPAPELLGGPSVFLFPPKPKDTLMISRTPEVTCVVVDVSHEDPEVKFNWYVDGVEVHNAKTKPCEEQYGSTYRCVSVLTVLHQDWLNGKEYKCKVSNKALPAPIEKTISKAKGQPREPQVYTLPPSREEMTKNQVSLTCLVKGFYPSDIAVEWESNGQPENNYKTTPPVLDSDGSFFLYSKLTVDKSRWQQGNVFSCSVMHEALHNHYTQKSLSLSPGGGGGSSPGQGTQSENSCTHFPGNLPNMLRDLRDAFSRVKTFFRMKDQLDNLLLKESLLEDFKGYLGCQALSEMIQFYLEEVMPQAENQDPDIKAHVNSLGENLKTLRLRLRRCHRFLPCENGGGSGGKSKAVEQVKNAFNKLQEKGIYKAMSEFDIFINYIEAYMTMKIRN

SEQ ID NO: 1000 - protein, 236 aa, synthetic construct; identical to SEQ ID NO: 45
  REGION 1..236: note = Synthetic

SEQ ID NO: 1001 - protein, 646 aa, synthetic construct
  REGION 1..646: note = Synthetic
MDMRVPAQLLGLLLLWLRGARCQVQLVQSGAEVKKPGASVKVSCKASGYTFTSYDINWVRQATGQGLEWMGWMNPNRGNTGYVKKFQGRVTMTRDTSISTAYMELSSLRSEDTAVYYCARRRAVYRSSWEWYFDLWGRGTLVTVSSASTKGPSVFPLAPSSKSTSGGTAALGCLVKDYFPEPVTVSWNSGALTSGVHTFPAVLQSSGLYSLSSVVTVPSSSLGTQTYICNVNHKPSNTKVDKKVEPKSCDKTHTCPPCPAPELLGGPSVFLFPPKPKDTLMISRTPEVTCVVVDVSHEDPEVKFNWYVDGVEVHNAKTKPCEEQYGSTYRCVSVLTVLHQDWLNGKEYKCKVSNKALPAPIEKTISKAKGQPREPQVYTLPPSREEMTKNQVSLTCLVKGFYPSDIAVEWESNGQPENNYKTTPPVLDSDGSFFLYSKLTVDKSRWQQGNVFSCSVMHEALHNHYTQKSLSLSPGGGGGSSPGQGTQSENSCTHFPGNLPNMLRDLRDAFSRVKTFFQMKDQLDNKLLKESLLEDFKGYLGCQALSEMIQFYLEEVMPQAENQDPDIKAHVNSLGENLKTLRLRLRRCHRFLPCENGGGSGGKSKAVEQVKNAFNKLQEKGIYKAMSEFDIFINYIEAYMTMKIRN

SEQ ID NO: 1002 - protein, 236 aa, synthetic construct; identical to SEQ ID NO: 45
  REGION 1..236: note = Synthetic

SEQ ID NO: 1003 - protein, 646 aa, synthetic construct
  REGION 1..646: note = Synthetic
MDMRVPAQLLGLLLLWLRGARCQVQLVQSGAEVKKPGASVKVSCKASGYTFTSYDINWVRQATGQGLEWMGWMNPNRGNTGYVKKFQGRVTMTRDTSISTAYMELSSLRSEDTAVYYCARRRAVYRSSWEWYFDLWGRGTLVTVSSASTKGPSVFPLAPSSKSTSGGTAALGCLVKDYFPEPVTVSWNSGALTSGVHTFPAVLQSSGLYSLSSVVTVPSSSLGTQTYICNVNHKPSNTKVDKKVEPKSCDKTHTCPPCPAPELLGGPSVFLFPPKPKDTLMISRTPEVTCVVVDVSHEDPEVKFNWYVDGVEVHNAKTKPCEEQYGSTYRCVSVLTVLHQDWLNGKEYKCKVSNKALPAPIEKTISKAKGQPREPQVYTLPPSREEMTKNQVSLTCLVKGFYPSDIAVEWESNGQPENNYKTTPPVLDSDGSFFLYSKLTVDKSRWQQGNVFSCSVMHEALHNHYTQKSLSLSPGGGGGSSPGQGTQSENSCTHFPGNLPNMLRDLRDAFSRVDTFFQMKDQLDNLLLKESLLEDFKGYLGCQALSEMIQFYLEEVMPQAENQDPDIKAHVNSLGENLKTLRLRLRRCHRFLPCENGGGSGGKSKAVEQVKNAFNKLQEKGIYKAMSEFDIFINYIEAYMTMKIRN

SEQ ID NO: 1004 - protein, 236 aa, synthetic construct; identical to SEQ ID NO: 45
  REGION 1..236: note = Synthetic

SEQ ID NO: 1005 - protein, 646 aa, synthetic construct
  REGION 1..646: note = Synthetic
MDMRVPAQLLGLLLLWLRGARCQVQLVQSGAEVKKPGASVKVSCKASGYTFTSYDINWVRQATGQGLEWMGWMNPNRGNTGYVKKFQGRVTMTRDTSISTAYMELSSLRSEDTAVYYCARRRAVYRSSWEWYFDLWGRGTLVTVSSASTKGPSVFPLAPSSKSTSGGTAALGCLVKDYFPEPVTVSWNSGALTSGVHTFPAVLQSSGLYSLSSVVTVPSSSLGTQTYICNVNHKPSNTKVDKKVEPKSCDKTHTCPPCPAPELLGGPSVFLFPPKPKDTLMISRTPEVTCVVVDVSHEDPEVKFNWYVDGVEVHNAKTKPCEEQYGSTYRCVSVLTVLHQDWLNGKEYKCKVSNKALPAPIEKTISKAKGQPREPQVYTLPPSREEMTKNQVSLTCLVKGFYPSDIAVEWESNGQPENNYKTTPPVLDSDGSFFLYSKLTVDKSRWQQGNVFSCSVMHEALHNHYTQKSLSLSPGGGGGSSPGQGTQSENSCTHFPGNLPNMLRDLRDAFSRVKTFFEMKDQLDNLLLKESLLEDFKGYLGCQALSEMIQFYLEEVMPQAENQDPDIKAHVNSLGENLKTLRLRLRRCHRFLPCENGGGSGGKSKAVEQVKNAFNKLQEKGIYKAMSEFDIFINYIEAYMTMKIRN

SEQ ID NO: 1006 - protein, 236 aa, synthetic construct; identical to SEQ ID NO: 45
  REGION 1..236: note = Synthetic

SEQ ID NO: 1007 - protein, 644 aa, synthetic construct
  REGION 1..644: note = Synthetic
MDMRVPAQLLGLLLLWLRGARCQVQLVQSGAEVKKPGASVKVSCKASGYTFTGYYMHWVRQAPGQGLEWMGWFKPNSGVTNYAQKFQGRVTMSRDTSISTAYMELSSLRSDDTAVYYCARAGYSTSWKDWFDPWGQGTLVTVSSASTKGPSVFPLAPSSKSTSGGTAALGCLVKDYFPEPVTVSWNSGALTSGVHTFPAVLQSSGLYSLSSVVTVPSSSLGTQTYICNVNHKPSNTKVDKKVEPKSCDKTHTCPPCPAPELLGGPSVFLFPPKPKDTLMISRTPEVTCVVVDVSHEDPEVKFNWYVDGVEVHNAKTKPCEEQYGSTYRCVSVLTVLHQDWLNGKEYKCKVSNKALPAPIEKTISKAKGQPREPQVYTLPPSREEMTKNQVSLTCLVKGFYPSDIAVEWESNGQPENNYKTTPPVLDSDGSFFLYSKLTVDKSRWQQGNVFSCSVMHEALHNHYTQKSLSLSPGGGGGSSPGQGTQSENSCTHFPGNLPNMLRDLLDAFSRVKTFFQMKDQLDNLLLKESLLEDFKGYLGCQALSEMIQFYLEEVMPQAENQDPDIKAHVNSLGENLKTLRLRLRRCHRFLPCENGGGSGGKSKAVEQVKNAFNKLQEKGIYKAMSEFDIFINYIEAYMTMKIRN

SEQ ID NO: 1008 - protein, 236 aa, synthetic construct; identical to SEQ ID NO: 25
  REGION 1..236: note = Synthetic

SEQ ID NO: 1009 - protein, 644 aa, synthetic construct
  REGION 1..644: note = Synthetic
MDMRVPAQLLGLLLLWLRGARCQVQLVQSGAEVKKPGASVKVSCKASGYTFTGYYMHWVRQAPGQGLEWMGWFKPNSGVTNYAQKFQGRVTMSRDTSISTAYMELSSLRSDDTAVYYCARAGYSTSWKDWFDPWGQGTLVTVSSASTKGPSVFPLAPSSKSTSGGTAALGCLVKDYFPEPVTVSWNSGALTSGVHTFPAVLQSSGLYSLSSVVTVPSSSLGTQTYICNVNHKPSNTKVDKKVEPKSCDKTHTCPPCPAPELLGGPSVFLFPPKPKDTLMISRTPEVTCVVVDVSHEDPEVKFNWYVDGVEVHNAKTKPCEEQYGSTYRCVSVLTVLHQDWLNGKEYKCKVSNKALPAPIEKTISKAKGQPREPQVYTLPPSREEMTKNQVSLTCLVKGFYPSDIAVEWESNGQPENNYKTTPPVLDSDGSFFLYSKLTVDKSRWQQGNVFSCSVMHEALHNHYTQKSLSLSPGGGGGSSPGQGTQSENSCTHFPGNLPNMLRDLRDAFSRVKTFFQMKDQLDNLLLKESLLEDFKGYLGCQALSEMIQFYLEEVMPQAENQDPDIKAHVNSLGENLKTLRLRLRRCHRFLPCENGGGSGGKSKAVEQVKNAFNKLQEKGIYLAMSEFDIFINYIEAYMTMKIRN

SEQ ID NO: 1010 - protein, 236 aa, synthetic construct; identical to SEQ ID NO: 25
  REGION 1..236: note = Synthetic

SEQ ID NO: 1011 - protein, 644 aa, synthetic construct
  REGION 1..644: note = Synthetic
MDMRVPAQLLGLLLLWLRGARCQVQLVQSGAEVKKPGASVKVSCKASGYTFTGYYMHWVRQAPGQGLEWMGWFKPNSGVTNYAQKFQGRVTMSRDTSISTAYMELSSLRSDDTAVYYCARAGYSTSWKDWFDPWGQGTLVTVSSASTKGPSVFPLAPSSKSTSGGTAALGCLVKDYFPEPVTVSWNSGALTSGVHTFPAVLQSSGLYSLSSVVTVPSSSLGTQTYICNVNHKPSNTKVDKKVEPKSCDKTHTCPPCPAPELLGGPSVFLFPPKPKDTLMISRTPEVTCVVVDVSHEDPEVKFNWYVDGVEVHNAKTKPCEEQYGSTYRCVSVLTVLHQDWLNGKEYKCKVSNKALPAPIEKTISKAKGQPREPQVYTLPPSREEMTKNQVSLTCLVKGFYPSDIAVEWESNGQPENNYKTTPPVLDSDGSFFLYSKLTVDKSRWQQGNVFSCSVMHEALHNHYTQKSLSLSPGGGGGSSPGQGTQSENSCTHFPGNLPNMLRDLRDAFSRVKTFFQMKDQLDNLLLKESLLEDFKGYLGCQALSEMIQFYLEEVMPQAENQDPDIKAHVNSLGENLKTLRLRLRRCHRFLPCENGGGSGGKSKAVEQVKNAFNKLQEKGIYDAMSEFDIFINYIEAYMTMKIRN

SEQ ID NO: 1012 - protein, 236 aa, synthetic construct; identical to SEQ ID NO: 25
  REGION 1..236: note = Synthetic

SEQ ID NO: 1013 - protein, 644 aa, synthetic construct
  REGION 1..644: note = Synthetic
MDMRVPAQLLGLLLLWLRGARCQVQLVQSGAEVKKPGASVKVSCKASGYTFTGYYMHWVRQAPGQGLEWMGWFKPNSGVTNYAQKFQGRVTMSRDTSISTAYMELSSLRSDDTAVYYCARAGYSTSWKDWFDPWGQGTLVTVSSASTKGPSVFPLAPSSKSTSGGTAALGCLVKDYFPEPVTVSWNSGALTSGVHTFPAVLQSSGLYSLSSVVTVPSSSLGTQTYICNVNHKPSNTKVDKKVEPKSCDKTHTCPPCPAPELLGGPSVFLFPPKPKDTLMISRTPEVTCVVVDVSHEDPEVKFNWYVDGVEVHNAKTKPCEEQYGSTYRCVSVLTVLHQDWLNGKEYKCKVSNKALPAPIEKTISKAKGQPREPQVYTLPPSREEMTKNQVSLTCLVKGFYPSDIAVEWESNGQPENNYKTTPPVLDSDGSFFLYSKLTVDKSRWQQGNVFSCSVMHEALHNHYTQKSLSLSPGGGGGSSPGQGTQSENSCTHFPGNLPNMLRDLRDAFSRVKTFFQMKGQLDNLLLKESLLEDFKGYLGCQALSEMIQFYLEEVMPQAENQDPDIKAHVNSLGENLKTLRLRLRRCHRFLPCENGGGSGGKSKAVEQVKNAFNKLQEKGIYKAMSEFDIFINYIEAYMTMKIRN

SEQ ID NO: 1014 - protein, 236 aa, synthetic construct; identical to SEQ ID NO: 25
  REGION 1..236: note = Synthetic

SEQ ID NO: 1015 - protein, 644 aa, synthetic construct
  REGION 1..644: note = Synthetic
MDMRVPAQLLGLLLLWLRGARCQVQLVQSGAEVKKPGASVKVSCKASGYTFTGYYMHWVRQAPGQGLEWMGWFKPNSGVTNYAQKFQGRVTMSRDTSISTAYMELSSLRSDDTAVYYCARAGYSTSWKDWFDPWGQGTLVTVSSASTKGPSVFPLAPSSKSTSGGTAALGCLVKDYFPEPVTVSWNSGALTSGVHTFPAVLQSSGLYSLSSVVTVPSSSLGTQTYICNVNHKPSNTKVDKKVEPKSCDKTHTCPPCPAPELLGGPSVFLFPPKPKDTLMISRTPEVTCVVVDVSHEDPEVKFNWYVDGVEVHNAKTKPCEEQYGSTYRCVSVLTVLHQDWLNGKEYKCKVSNKALPAPIEKTISKAKGQPREPQVYTLPPSREEMTKNQVSLTCLVKGFYPSDIAVEWESNGQPENNYKTTPPVLDSDGSFFLYSKLTVDKSRWQQGNVFSCSVMHEALHNHYTQKSLSLSPGGGGGSSPGQGTQSENSCTHFPGNLPNMLRDLRDAFSRVKTFFRMKDQLDNLLLKESLLEDFKGYLGCQALSEMIQFYLEEVMPQAENQDPDIKAHVNSLGENLKTLRLRLRRCHRFLPCENGGGSGGKSKAVEQVKNAFNKLQEKGIYKAMSEFDIFINYIEAYMTMKIRN

SEQ ID NO: 1016 - protein, 236 aa, synthetic construct; identical to SEQ ID NO: 25
  REGION 1..236: note = Synthetic

SEQ ID NO: 1017 - protein, 644 aa, synthetic construct
  REGION 1..644: note = Synthetic
MDMRVPAQLLGLLLLWLRGARCQVQLVQSGAEVKKPGASVKVSCKASGYTFTGYYMHWVRQAPGQGLEWMGWFKPNSGVTNYAQKFQGRVTMSRDTSISTAYMELSSLRSDDTAVYYCARAGYSTSWKDWFDPWGQGTLVTVSSASTKGPSVFPLAPSSKSTSGGTAALGCLVKDYFPEPVTVSWNSGALTSGVHTFPAVLQSSGLYSLSSVVTVPSSSLGTQTYICNVNHKPSNTKVDKKVEPKSCDKTHTCPPCPAPELLGGPSVFLFPPKPKDTLMISRTPEVTCVVVDVSHEDPEVKFNWYVDGVEVHNAKTKPCEEQYGSTYRCVSVLTVLHQDWLNGKEYKCKVSNKALPAPIEKTISKAKGQPREPQVYTLPPSREEMTKNQVSLTCLVKGFYPSDIAVEWESNGQPENNYKTTPPVLDSDGSFFLYSKLTVDKSRWQQGNVFSCSVMHEALHNHYTQKSLSLSPGGGGGSSPGQGTQSENSCTHFPGNLPNMLRDLRDAFSRVKTFFQMKDQLDNKLLKESLLEDFKGYLGCQALSEMIQFYLEEVMPQAENQDPDIKAHVNSLGENLKTLRLRLRRCHRFLPCENGGGSGGKSKAVEQVKNAFNKLQEKGIYKAMSEFDIFINYIEAYMTMKIRN

SEQ ID NO: 1018 - protein, 236 aa, synthetic construct; identical to SEQ ID NO: 25
  REGION 1..236: note = Synthetic

SEQ ID NO: 1019 - protein, 644 aa, synthetic construct
  REGION 1..644: note = Synthetic
MDMRVPAQLLGLLLLWLRGARCQVQLVQSGAEVKKPGASVKVSCKASGYTFTGYYMHWVRQAPGQGLEWMGWFKPNSGVTNYAQKFQGRVTMSRDTSISTAYMELSSLRSDDTAVYYCARAGYSTSWKDWFDPWGQGTLVTVSSASTKGPSVFPLAPSSKSTSGGTAALGCLVKDYFPEPVTVSWNSGALTSGVHTFPAVLQSSGLYSLSSVVTVPSSSLGTQTYICNVNHKPSNTKVDKKVEPKSCDKTHTCPPCPAPELLGGPSVFLFPPKPKDTLMISRTPEVTCVVVDVSHEDPEVKFNWYVDGVEVHNAKTKPCEEQYGSTYRCVSVLTVLHQDWLNGKEYKCKVSNKALPAPIEKTISKAKGQPREPQVYTLPPSREEMTKNQVSLTCLVKGFYPSDIAVEWESNGQPENNYKTTPPVLDSDGSFFLYSKLTVDKSRWQQGNVFSCSVMHEALHNHYTQKSLSLSPGGGGGSSPGQGTQSENSCTHFPGNLPNMLRDLRDAFSRVDTFFQMKDQLDNLLLKESLLEDFKGYLGCQALSEMIQFYLEEVMPQAENQDPDIKAHVNSLGENLKTLRLRLRRCHRFLPCENGGGSGGKSKAVEQVKNAFNKLQEKGIYKAMSEFDIFINYIEAYMTMKIRN

SEQ ID NO: 1020 - protein, 236 aa, synthetic construct; identical to SEQ ID NO: 25
  REGION 1..236: note = Synthetic

SEQ ID NO: 1021 - protein, 644 aa, synthetic construct
  REGION 1..644: note = Synthetic
MDMRVPAQLLGLLLLWLRGARCQVQLVQSGAEVKKPGASVKVSCKASGYTFTGYYMHWVRQAPGQGLEWMGWFKPNSGVTNYAQKFQGRVTMSRDTSISTAYMELSSLRSDDTAVYYCARAGYSTSWKDWFDPWGQGTLVTVSSASTKGPSVFPLAPSSKSTSGGTAALGCLVKDYFPEPVTVSWNSGALTSGVHTFPAVLQSSGLYSLSSVVTVPSSSLGTQTYICNVNHKPSNTKVDKKVEPKSCDKTHTCPPCPAPELLGGPSVFLFPPKPKDTLMISRTPEVTCVVVDVSHEDPEVKFNWYVDGVEVHNAKTKPCEEQYGSTYRCVSVLTVLHQDWLNGKEYKCKVSNKALPAPIEKTISKAKGQPREPQVYTLPPSREEMTKNQVSLTCLVKGFYPSDIAVEWESNGQPENNYKTTPPVLDSDGSFFLYSKLTVDKSRWQQGNVFSCSVMHEALHNHYTQKSLSLSPGGGGGSSPGQGTQSENSCTHFPGNLPNMLRDLRDAFSRVKTFFEMKDQLDNLLLKESLLEDFKGYLGCQALSEMIQFYLEEVMPQAENQDPDIKAHVNSLGENLKTLRLRLRRCHRFLPCENGGGSGGKSKAVEQVKNAFNKLQEKGIYKAMSEFDIFINYIEAYMTMKIRN

SEQ ID NO: 1022 - protein, 236 aa, synthetic construct; identical to SEQ ID NO: 25
  REGION 1..236: note = Synthetic

SEQ ID NO: 1023 - protein, 643 aa, synthetic construct
  REGION 1..643: note = Synthetic
MDMRVPAQLLGLLLLWLRGARCQVQLVQSGAEVKKPGASVKVSCKASGYTFNGYYIHWVRQAPGQGLEWMGWLNPNSGGANYAQKFQGWVTMTRDTSISTAYMELSRLTSDDTAVYYCARDQRKTTVTPFEYWGQGTLVTVSSASTKGPSVFPLAPSSKSTSGGTAALGCLVKDYFPEPVTVSWNSGALTSGVHTFPAVLQSSGLYSLSSVVTVPSSSLGTQTYICNVNHKPSNTKVDKKVEPKSCDKTHTCPPCPAPELLGGPSVFLFPPKPKDTLMISRTPEVTCVVVDVSHEDPEVKFNWYVDGVEVHNAKTKPCEEQYGSTYRCVSVLTVLHQDWLNGKEYKCKVSNKALPAPIEKTISKAKGQPREPQVYTLPPSREEMTKNQVSLTCLVKGFYPSDIAVEWESNGQPENNYKTTPPVLDSDGSFFLYSKLTVDKSRWQQGNVFSCSVMHEALHNHYTQKSLSLSPGGGGGSSPGQGTQSENSCTHFPGNLPNMLRDLLDAFSRVKTFFQMKDQLDNLLLKESLLEDFKGYLGCQALSEMIQFYLEEVMPQAENQDPDIKAHVNSLGENLKTLRLRLRRCHRFLPCENGGGSGGKSKAVEQVKNAFNKLQEKGIYKAMSEFDIFINYIEAYMTMKIRN

SEQ ID NO: 1024 - protein, 230 aa, synthetic construct
  REGION 1..230: note = Synthetic
MAWALLLLTLLTQGTGSWASYELTQPPSVSVSPGQTASITCSGDKLGERNVSWYQLKPGQSPILVIYQDNKRPSGIPERFSGSKSGNTAILTISGTQAMDEADYYCQAWDRNVVFGGGTKLTVLGQPKAAPSVTLFPPSSEELQANKATLVCLISDFYPGAVTVAWKADSSPVKAGVETTTPSKQSNNKYAASSYLSLTPEQWKSHRSYSCQVTHEGSTVEKTVAPTECS

SEQ ID NO: 1025 - protein, 643 aa, synthetic construct
  REGION 1..643: note = Synthetic
MDMRVPAQLLGLLLLWLRGARCQVQLVQSGAEVKKPGASVKVSCKASGYTFNGYYIHWVRQAPGQGLEWMGWLNPNSGGANYAQKFQGWVTMTRDTSISTAYMELSRLTSDDTAVYYCARDQRKTTVTPFEYWGQGTLVTVSSASTKGPSVFPLAPSSKSTSGGTAALGCLVKDYFPEPVTVSWNSGALTSGVHTFPAVLQSSGLYSLSSVVTVPSSSLGTQTYICNVNHKPSNTKVDKKVEPKSCDKTHTCPPCPAPELLGGPSVFLFPPKPKDTLMISRTPEVTCVVVDVSHEDPEVKFNWYVDGVEVHNAKTKPCEEQYGSTYRCVSVLTVLHQDWLNGKEYKCKVSNKALPAPIEKTISKAKGQPREPQVYTLPPSREEMTKNQVSLTCLVKGFYPSDIAVEWESNGQPENNYKTTPPVLDSDGSFFLYSKLTVDKSRWQQGNVFSCSVMHEALHNHYTQKSLSLSPGGGGGSSPGQGTQSENSCTHFPGNLPNMLRDLRDAFSRVKTFFQMKDQLDNLLLKESLLEDFKGYLGCQALSEMIQFYLEEVMPQAENQDPDIKAHVNSLGENLKTLRLRLRRCHRFLPCENGGGSGGKSKAVEQVKNAFNKLQEKGIYLAMSEFDIFINYIEAYMTMKIRN

SEQ ID NO: 1026 - protein, 230 aa, synthetic construct; identical to SEQ ID NO: 1024
  REGION 1..230: note = Synthetic

SEQ ID NO: 1027 - protein, 643 aa, synthetic construct
  REGION 1..643: note = Synthetic
MDMRVPAQLLGLLLLWLRGARCQVQLVQSGAEVKKPGASVKVSCKASGYTFNGYYIHWVRQAPGQGLEWMGWLNPNSGGANYAQKFQGWVTMTRDTSISTAYMELSRLTSDDTAVYYCARDQRKTTVTPFEYWGQGTLVTVSSASTKGPSVFPLAPSSKSTSGGTAALGCLVKDYFPEPVTVSWNSGALTSGVHTFPAVLQSSGLYSLSSVVTVPSSSLGTQTYICNVNHKPSNTKVDKKVEPKSCDKTHTCPPCPAPELLGGPSVFLFPPKPKDTLMISRTPEVTCVVVDVSHEDPEVKFNWYVDGVEVHNAKTKPCEEQYGSTYRCVSVLTVLHQDWLNGKEYKCKVSNKALPAPIEKTISKAKGQPREPQVYTLPPSREEMTKNQVSLTCLVKGFYPSDIAVEWESNGQPENNYKTTPPVLDSDGSFFLYSKLTVDKSRWQQGNVFSCSVMHEALHNHYTQKSLSLSPGGGGGSSPGQGTQSENSCTHFPGNLPNMLRDLRDAFSRVKTFFQMKDQLDNLLLKESLLEDFKGYLGCQALSEMIQFYLEEVMPQAENQDPDIKAHVNSLGENLKTLRLRLRRCHRFLPCENGGGSGGKSKAVEQVKNAFNKLQEKGIYDAMSEFDIFINYIEAYMTMKIRN

SEQ ID NO: 1028 - protein, 230 aa, synthetic construct; identical to SEQ ID NO: 1024
  REGION 1..230: note = Synthetic

SEQ ID NO: 1029 - protein, 643 aa, synthetic construct
  REGION 1..643: note = Synthetic
MDMRVPAQLLGLLLLWLRGARCQVQLVQSGAEVKKPGASVKVSCKASGYTFNGYYIHWVRQAPGQGLEWMGWLNPNSGGANYAQKFQGWVTMTRDTSISTAYMELSRLTSDDTAVYYCARDQRKTTVTPFEYWGQGTLVTVSSASTKGPSVFPLAPSSKSTSGGTAALGCLVKDYFPEPVTVSWNSGALTSGVHTFPAVLQSSGLYSLSSVVTVPSSSLGTQTYICNVNHKPSNTKVDKKVEPKSCDKTHTCPPCPAPELLGGPSVFLFPPKPKDTLMISRTPEVTCVVVDVSHEDPEVKFNWYVDGVEVHNAKTKPCEEQYGSTYRCVSVLTVLHQDWLNGKEYKCKVSNKALPAPIEKTISKAKGQPREPQVYTLPPSREEMTKNQVSLTCLVKGFYPSDIAVEWESNGQPENNYKTTPPVLDSDGSFFLYSKLTVDKSRWQQGNVFSCSVMHEALHNHYTQKSLSLSPGGGGGSSPGQGTQSENSCTHFPGNLPNMLRDLRDAFSRVKTFFQMKGQLDNLLLKESLLEDFKGYLGCQALSEMIQFYLEEVMPQAENQDPDIKAHVNSLGENLKTLRLRLRRCHRFLPCENGGGSGGKSKAVEQVKNAFNKLQEKGIYKAMSEFDIFINYIEAYMTMKIRN

SEQ ID NO: 1030 - protein, 230 aa, synthetic construct; identical to SEQ ID NO: 1024
  REGION 1..230: note = Synthetic

SEQ ID NO: 1031 - protein, 643 aa, synthetic construct
  REGION 1..643: note = Synthetic
MDMRVPAQLLGLLLLWLRGARCQVQLVQSGAEVKKPGASVKVSCKASGYTFNGYYIHWVRQAPGQGLEWMGWLNPNSGGANYAQKFQGWVTMTRDTSISTAYMELSRLTSDDTAVYYCARDQRKTTVTPFEYWGQGTLVTVSSASTKGPSVFPLAPSSKSTSGGTAALGCLVKDYFPEPVTVSWNSGALTSGVHTFPAVLQSSGLYSLSSVVTVPSSSLGTQTYICNVNHKPSNTKVDKKVEPKSCDKTHTCPPCPAPELLGGPSVFLFPPKPKDTLMISRTPEVTCVVVDVSHEDPEVKFNWYVDGVEVHNAKTKPCEEQYGSTYRCVSVLTVLHQDWLNGKEYKCKVSNKALPAPIEKTISKAKGQPREPQVYTLPPSREEMTKNQVSLTCLVKGFYPSDIAVEWESNGQPENNYKTTPPVLDSDGSFFLYSKLTVDKSRWQQGNVFSCSVMHEALHNHYTQKSLSLSPGGGGGSSPGQGTQSENSCTHFPGNLPNMLRDLRDAFSRVKTFFRMKDQLDNLLLKESLLEDFKGYLGCQALSEMIQFYLEEVMPQAENQDPDIKAHVNSLGENLKTLRLRLRRCHRFLPCENGGGSGGKSKAVEQVKNAFNKLQEKGIYKAMSEFDIFINYIEAYMTMKIRN

SEQ ID NO: 1032 - protein, 230 aa, synthetic construct; identical to SEQ ID NO: 1024
  REGION 1..230: note = Synthetic

SEQ ID NO: 1033 - protein, 643 aa, synthetic construct
  REGION 1..643: note = Synthetic
MDMRVPAQLLGLLLLWLRGARCQVQLVQSGAEVKKPGASVKVSCKASGYTFNGYYIHWVRQAPGQGLEWMGWLNPNSGGANYAQKFQGWVTMTRDTSISTAYMELSRLTSDDTAVYYCARDQRKTTVTPFEYWGQGTLVTVSSASTKGPSVFPLAPSSKSTSGGTAALGCLVKDYFPEPVTVSWNSGALTSGVHTFPAVLQSSGLYSLSSVVTVPSSSLGTQTYICNVNHKPSNTKVDKKVEPKSCDKTHTCPPCPAPELLGGPSVFLFPPKPKDTLMISRTPEVTCVVVDVSHEDPEVKFNWYVDGVEVHNAKTKPCEEQYGSTYRCVSVLTVLHQDWLNGKEYKCKVSNKALPAPIEKTISKAKGQPREPQVYTLPPSREEMTKNQVSLTCLVKGFYPSDIAVEWESNGQPENNYKTTPPVLDSDGSFFLYSKLTVDKSRWQQGNVFSCSVMHEALHNHYTQKSLSLSPGGGGGSSPGQGTQSENSCTHFPGNLPNMLRDLRDAFSRVKTFFQMKDQLDNKLLKESLLEDFKGYLGCQALSEMIQFYLEEVMPQAENQDPDIKAHVNSLGENLKTLRLRLRRCHRFLPCENGGGSGGKSKAVEQVKNAFNKLQEKGIYKAMSEFDIFINYIEAYMTMKIRN

SEQ ID NO: 1034 - protein, 230 aa, synthetic construct; identical to SEQ ID NO: 1024
  REGION 1..230: note = Synthetic

SEQ ID NO: 1035 - protein, 643 aa, synthetic construct
  REGION 1..643: note = Synthetic
MDMRVPAQLLGLLLLWLRGARCQVQLVQSGAEVKKPGASVKVSCKASGYTFNGYYIHWVRQAPGQGLEWMGWLNPNSGGANYAQKFQGWVTMTRDTSISTAYMELSRLTSDDTAVYYCARDQRKTTVTPFEYWGQGTLVTVSSASTKGPSVFPLAPSSKSTSGGTAALGCLVKDYFPEPVTVSWNSGALTSGVHTFPAVLQSSGLYSLSSVVTVPSSSLGTQTYICNVNHKPSNTKVDKKVEPKSCDKTHTCPPCPAPELLGGPSVFLFPPKPKDTLMISRTPEVTCVVVDVSHEDPEVKFNWYVDGVEVHNAKTKPCEEQYGSTYRCVSVLTVLHQDWLNGKEYKCKVSNKALPAPIEKTISKAKGQPREPQVYTLPPSREEMTKNQVSLTCLVKGFYPSDIAVEWESNGQPENNYKTTPPVLDSDGSFFLYSKLTVDKSRWQQGNVFSCSVMHEALHNHYTQKSLSLSPGGGGGSSPGQGTQSENSCTHFPGNLPNMLRDLRDAFSRVDTFFQMKDQLDNLLLKESLLEDFKGYLGCQALSEMIQFYLEEVMPQAENQDPDIKAHVNSLGENLKTLRLRLRRCHRFLPCENGGGSGGKSKAVEQVKNAFNKLQEKGIYKAMSEFDIFINYIEAYMTMKIRN

SEQ ID NO: 1036 - protein, 230 aa, synthetic construct; identical to SEQ ID NO: 1024
  REGION 1..230: note = Synthetic

SEQ ID NO: 1037 - protein, 643 aa, synthetic construct
  REGION 1..643: note = Synthetic
MDMRVPAQLLGLLLLWLRGARCQVQLVQSGAEVKKPGASVKVSCKASGYTFNGYYIHWVRQAPGQGLEWMGWLNPNSGGANYAQKFQGWVTMTRDTSISTAYMELSRLTSDDTAVYYCARDQRKTTVTPFEYWGQGTLVTVSSASTKGPSVFPLAPSSKSTSGGTAALGCLVKDYFPEPVTVSWNSGALTSGVHTFPAVLQSSGLYSLSSVVTVPSSSLGTQTYICNVNHKPSNTKVDKKVEPKSCDKTHTCPPCPAPELLGGPSVFLFPPKPKDTLMISRTPEVTCVVVDVSHEDPEVKFNWYVDGVEVHNAKTKPCEEQYGSTYRCVSVLTVLHQDWLNGKEYKCKVSNKALPAPIEKTISKAKGQPREPQVYTLPPSREEMTKNQVSLTCLVKGFYPSDIAVEWESNGQPENNYKTTPPVLDSDGSFFLYSKLTVDKSRWQQGNVFSCSVMHEALHNHYTQKSLSLSPGGGGGSSPGQGTQSENSCTHFPGNLPNMLRDLRDAFSRVKTFFEMKDQLDNLLLKESLLEDFKGYLGCQALSEMIQFYLEEVMPQAENQDPDIKAHVNSLGENLKTLRLRLRRCHRFLPCENGGGSGGKSKAVEQVKNAFNKLQEKGIYKAMSEFDIFINYIEAYMTMKIRN

SEQ ID NO: 1038 - protein, 230 aa, synthetic construct; identical to SEQ ID NO: 1024
  REGION 1..230: note = Synthetic

SEQ ID NO: 1039 - protein, 644 aa, synthetic construct
  REGION 1..644: note = Synthetic
MDMRVPAQLLGLLLLWLRGARCQVQLVQSGAEVTKPGASVKVSCKASGYTFTRYDINWVRQATGQGLEWMGWMNPNSGNSGSVQKFRGRVTMTRDTSITTVYMELSSLRSDDTAVYYCARGGISSSWHWAFDIWGQGTMVTVSSASTKGPSVFPLAPSSKSTSGGTAALGCLVKDYFPEPVTVSWNSGALTSGVHTFPAVLQSSGLYSLSSVVTVPSSSLGTQTYICNVNHKPSNTKVDKKVEPKSCDKTHTCPPCPAPELLGGPSVFLFPPKPKDTLMISRTPEVTCVVVDVSHEDPEVKFNWYVDGVEVHNAKTKPCEEQYGSTYRCVSVLTVLHQDWLNGKEYKCKVSNKALPAPIEKTISKAKGQPREPQVYTLPPSREEMTKNQVSLTCLVKGFYPSDIAVEWESNGQPENNYKTTPPVLDSDGSFFLYSKLTVDKSRWQQGNVFSCSVMHEALHNHYTQKSLSLSPGGGGGSSPGQGTQSENSCTHFPGNLPNMLRDLLDAFSRVKTFFQMKDQLDNLLLKESLLEDFKGYLGCQALSEMIQFYLEEVMPQAENQDPDIKAHVNSLGENLKTLRLRLRRCHRFLPCENGGGSGGKSKAVEQVKNAFNKLQEKGIYKAMSEFDIFINYIEAYMTMKIRN

SEQ ID NO: 1040 - protein, 236 aa, synthetic construct; identical to SEQ ID NO: 105
  REGION 1..236: note = Synthetic

SEQ ID NO: 1041 - protein, 644 aa, synthetic construct
  REGION 1..644: note = Synthetic
MDMRVPAQLLGLLLLWLRGARCQVQLVQSGAEVTKPGASVKVSCKASGYTFTRYDINWVRQATGQGLEWMGWMNPNSGNSGSVQKFRGRVTMTRDTSITTVYMELSSLRSDDTAVYYCARGGISSSWHWAFDIWGQGTMVTVSSASTKGPSVFPLAPSSKSTSGGTAALGCLVKDYFPEPVTVSWNSGALTSGVHTFPAVLQSSGLYSLSSVVTVPSSSLGTQTYICNVNHKPSNTKVDKKVEPKSCDKTHTCPPCPAPELLGGPSVFLFPPKPKDTLMISRTPEVTCVVVDVSHEDPEVKFNWYVDGVEVHNAKTKPCEEQYGSTYRCVSVLTVLHQDWLNGKEYKCKVSNKALPAPIEKTISKAKGQPREPQVYTLPPSREEMTKNQVSLTCLVKGFYPSDIAVEWESNGQPENNYKTTPPVLDSDGSFFLYSKLTVDKSRWQQGNVFSCSVMHEALHNHYTQKSLSLSPGGGGGSSPGQGTQSENSCTHFPGNLPNMLRDLRDAFSRVKTFFQMKDQLDNLLLKESLLEDFKGYLGCQALSEMIQFYLEEVMPQAENQDPDIKAHVNSLGENLKTLRLRLRRCHRFLPCENGGGSGGKSKAVEQVKNAFNKLQEKGIYLAMSEFDIFINYIEAYMTMKIRN

SEQ ID NO: 1042 - protein, 236 aa, synthetic construct; identical to SEQ ID NO: 105
  REGION 1..236: note = Synthetic

SEQ ID NO: 1043 - protein, 644 aa, synthetic construct
  REGION 1..644: note = Synthetic
MDMRVPAQLLGLLLLWLRGARCQVQLVQSGAEVTKPGASVKVSCKASGYTFTRYDINWVRQATGQGLEWMGWMNPNSGNSGSVQKFRGRVTMTRDTSITTVYMELSSLRSDDTAVYYCARGGISSSWHWAFDIWGQGTMVTVSSASTKGPSVFPLAPSSKSTSGGTAALGCLVKDYFPEPVTVSWNSGALTSGVHTFPAVLQSSGLYSLSSVVTVPSSSLGTQTYICNVNHKPSNTKVDKKVEPKSCDKTHTCPPCPAPELLGGPSVFLFPPKPKDTLMISRTPEVTCVVVDVSHEDPEVKFNWYVDGVEVHNAKTKPCEEQYGSTYRCVSVLTVLHQDWLNGKEYKCKVSNKALPAPIEKTISKAKGQPREPQVYTLPPSREEMTKNQVSLTCLVKGFYPSDIAVEWESNGQPENNYKTTPPVLDSDGSFFLYSKLTVDKSRWQQGNVFSCSVMHEALHNHYTQKSLSLSPGGGGGSSPGQGTQSENSCTHFPGNLPNMLRDLRDAFSRVKTFFQMKDQLDNLLLKESLLEDFKGYLGCQALSEMIQFYLEEVMPQAENQDPDIKAHVNSLGENLKTLRLRLRRCHRFLPCENGGGSGGKSKAVEQVKNAFNKLQEKGIYDAMSEFDIFINYIEAYMTMKIRN

SEQ ID NO: 1044 - protein, 236 aa, synthetic construct; identical to SEQ ID NO: 105
  REGION 1..236: note = Synthetic

SEQ ID NO: 1045 - protein, 644 aa, synthetic construct
  REGION 1..644: note = Synthetic
MDMRVPAQLLGLLLLWLRGARCQVQLVQSGAEVTKPGASVKVSCKASGYTFTRYDINWVRQATGQGLEWMGWMNPNSGNSGSVQKFRGRVTMTRDTSITTVYMELSSLRSDDTAVYYCARGGISSSWHWAFDIWGQGTMVTVSSASTKGPSVFPLAPSSKSTSGGTAALGCLVKDYFPEPVTVSWNSGALTSGVHTFPAVLQSSGLYSLSSVVTVPSSSLGTQTYICNVNHKPSNTKVDKKVEPKSCDKTHTCPPCPAPELLGGPSVFLFPPKPKDTLMISRTPEVTCVVVDVSHEDPEVKFNWYVDGVEVHNAKTKPCEEQYGSTYRCVSVLTVLHQDWLNGKEYKCKVSNKALPAPIEKTISKAKGQPREPQVYTLPPSREEMTKNQVSLTCLVKGFYPSDIAVEWESNGQPENNYKTTPPVLDSDGSFFLYSKLTVDKSRWQQGNVFSCSVMHEALHNHYTQKSLSLSPGGGGGSSPGQGTQSENSCTHFPGNLPNMLRDLRDAFSRVKTFFQMKGQLDNLLLKESLLEDFKGYLGCQALSEMIQFYLEEVMPQAENQDPDIKAHVNSLGENLKTLRLRLRRCHRFLPCENGGGSGGKSKAVEQVKNAFNKLQEKGIYKAMSEFDIFINYIEAYMTMKIRN

SEQ ID NO: 1046 - protein, 236 aa, synthetic construct; identical to SEQ ID NO: 105
  REGION 1..236: note = Synthetic

SEQ ID NO: 1047 - protein, 644 aa, synthetic construct
  REGION 1..644: note = Synthetic
MDMRVPAQLLGLLLLWLRGARCQVQLVQSGAEVTKPGASVKVSCKASGYTFTRYDINWVRQATGQGLEWMGWMNPNSGNSGSVQKFRGRVTMTRDTSITTVYMELSSLRSDDTAVYYCARGGISSSWHWAFDIWGQGTMVTVSSASTKGPSVFPLAPSSKSTSGGTAALGCLVKDYFPEPVTVSWNSGALTSGVHTFPAVLQSSGLYSLSSVVTVPSSSLGTQTYICNVNHKPSNTKVDKKVEPKSCDKTHTCPPCPAPELLGGPSVFLFPPKPKDTLMISRTPEVTCVVVDVSHEDPEVKFNWYVDGVEVHNAKTKPCEEQYGSTYRCVSVLTVLHQDWLNGKEYKCKVSNKALPAPIEKTISKAKGQPREPQVYTLPPSREEMTKNQVSLTCLVKGFYPSDIAVEWESNGQPENNYKTTPPVLDSDGSFFLYSKLTVDKSRWQQGNVFSCSVMHEALHNHYTQKSLSLSPGGGGGSSPGQGTQSENSCTHFPGNLPNMLRDLRDAFSRVKTFFRMKDQLDNLLLKESLLEDFKGYLGCQALSEMIQFYLEEVMPQAENQDPDIKAHVNSLGENLKTLRLRLRRCHRFLPCENGGGSGGKSKAVEQVKNAFNKLQEKGIYKAMSEFDIFINYIEAYMTMKIRN

SEQ ID NO: 1048 - protein, 236 aa, synthetic construct; identical to SEQ ID NO: 105
  REGION 1..236: note = Synthetic

SEQ ID NO: 1049 - protein, 644 aa, synthetic construct
  REGION 1..644: note = Synthetic
MDMRVPAQLLGLLLLWLRGARCQVQLVQSGAEVTKPGASVKVSCKASGYTFTRYDINWVRQATGQGLEWMGWMNPNSGNSGSVQKFRGRVTMTRDTSITTVYMELSSLRSDDTAVYYCARGGISSSWHWAFDIWGQGTMVTVSSASTKGPSVFPLAPSSKSTSGGTAALGCLVKDYFPEPVTVSWNSGALTSGVHTFPAVLQSSGLYSLSSVVTVPSSSLGTQTYICNVNHKPSNTKVDKKVEPKSCDKTHTCPPCPAPELLGGPSVFLFPPKPKDTLMISRTPEVTCVVVDVSHEDPEVKFNWYVDGVEVHNAKTKPCEEQYGSTYRCVSVLTVLHQDWLNGKEYKCKVSNKALPAPIEKTISKAKGQPREPQVYTLPPSREEMTKNQVSLTCLVKGFYPSDIAVEWESNGQPENNYKTTPPVLDSDGSFFLYSKLTVDKSRWQQGNVFSCSVMHEALHNHYTQKSLSLSPGGGGGSSPGQGTQSENSCTHFPGNLPNMLRDLRDAFSRVKTFFQMKDQLDNKLLKESLLEDFKGYLGCQALSEMIQFYLEEVMPQAENQDPDIKAHVNSLGENLKTLRLRLRRCHRFLPCENGGGSGGKSKAVEQVKNAFNKLQEKGIYKAMSEFDIFINYIEAYMTMKIRN

SEQ ID NO: 1050 - protein, 236 aa, synthetic construct; identical to SEQ ID NO: 105
  REGION 1..236: note = Synthetic

SEQ ID NO: 1051 - protein, 644 aa, synthetic construct
  REGION 1..644: note = Synthetic
MDMRVPAQLLGLLLLWLRGARCQVQLVQSGAEVTKPGASVKVSCKASGYTFTRYDINWVRQATGQGLEWMGWMNPNSGNSGSVQKFRGRVTMTRDTSITTVYMELSSLRSDDTAVYYCARGGISSSWHWAFDIWGQGTMVTVSSASTKGPSVFPLAPSSKSTSGGTAALGCLVKDYFPEPVTVSWNSGALTSGVHTFPAVLQSSGLYSLSSVVTVPSSSLGTQTYICNVNHKPSNTKVDKKVEPKSCDKTHTCPPCPAPELLGGPSVFLFPPKPKDTLMISRTPEVTCVVVDVSHEDPEVKFNWYVDGVEVHNAKTKPCEEQYGSTYRCVSVLTVLHQDWLNGKEYKCKVSNKALPAPIEKTISKAKGQPREPQVYTLPPSREEMTKNQVSLTCLVKGFYPSDIAVEWESNGQPENNYKTTPPVLDSDGSFFLYSKLTVDKSRWQQGNVFSCSVMHEALHNHYTQKSLSLSPGGGGGSSPGQGTQSENSCTHFPGNLPNMLRDLRDAFSRVDTFFQMKDQLDNLLLKESLLEDFKGYLGCQALSEMIQFYLEEVMPQAENQDPDIKAHVNSLGENLKTLRLRLRRCHRFLPCENGGGSGGKSKAVEQVKNAFNKLQEKGIYKAMSEFDIFINYIEAYMTMKIRN

SEQ ID NO: 1052 - protein, 236 aa, synthetic construct; identical to SEQ ID NO: 105
  REGION 1..236: note = Synthetic

SEQ ID NO: 1053 - protein, 644 aa, synthetic construct
  REGION 1..644: note = Synthetic
MDMRVPAQLLGLLLLWLRGARCQVQLVQSGAEVTKPGASVKVSCKASGYTFTRYDINWVRQATGQGLEWMGWMNPNSGNSGSVQKFRGRVTMTRDTSITTVYMELSSLRSDDTAVYYCARGGISSSWHWAFDIWGQGTMVTVSSASTKGPSVFPLAPSSKSTSGGTAALGCLVKDYFPEPVTVSWNSGALTSGVHTFPAVLQSSGLYSLSSVVTVPSSSLGTQTYICNVNHKPSNTKVDKKVEPKSCDKTHTCPPCPAPELLGGPSVFLFPPKPKDTLMISRTPEVTCVVVDVSHEDPEVKFNWYVDGVEVHNAKTKPCEEQYGSTYRCVSVLTVLHQDWLNGKEYKCKVSNKALPAPIEKTISKAKGQPREPQVYTLPPSREEMTKNQVSLTCLVKGFYPSDIAVEWESNGQPENNYKTTPPVLDSDGSFFLYSKLTVDKSRWQQGNVFSCSVMHEALHNHYTQKSLSLSPGGGGGSSPGQGTQSENSCTHFPGNLPNMLRDLRDAFSRVKTFFEMKDQLDNLLLKESLLEDFKGYLGCQALSEMIQFYLEEVMPQAENQDPDIKAHVNSLGENLKTLRLRLRRCHRFLPCENGGGSGGKSKAVEQVKNAFNKLQEKGIYKAMSEFDIFINYIEAYMTMKIRN

SEQ ID NO: 1054 - protein, 236 aa, synthetic construct; identical to SEQ ID NO: 105
  REGION 1..236: note = Synthetic

SEQ ID NO: 1055 - protein, 641 aa, synthetic construct
  REGION 1..641: note = Synthetic
MDMRVPAQLLGLLLLWLRGARCEVQLLESGGGLVQPGGSLRLSCAASGFTFSSYAMTWVRQAPGRGLQWVSTISGSGSNTYYADSVKGRFTISRDNSKNTLYLQMSSLRAEDTAVYYCAKEGGSNRYFHHWGQGTLVTISSASTKGPSVFPLAPSSKSTSGGTAALGCLVKDYFPEPVTVSWNSGALTSGVHTFPAVLQSSGLYSLSSVVTVPSSSLGTQTYICNVNHKPSNTKVDKKVEPKSCDKTHTCPPCPAPELLGGPSVFLFPPKPKDTLMISRTPEVTCVVVDVSHEDPEVKFNWYVDGVEVHNAKTKPCEEQYGSTYRCVSVLTVLHQDWLNGKEYKCKVSNKALPAPIEKTISKAKGQPREPQVYTLPPSREEMTKNQVSLTCLVKGFYPSDIAVEWESNGQPENNYKTTPPVLDSDGSFFLYSKLTVDKSRWQQGNVFSCSVMHEALHNHYTQKSLSLSPGGGGGSSPGQGTQSENSCTHFPGNLPNMLRDLLDAFSRVKTFFQMKDQLDNLLLKESLLEDFKGYLGCQALSEMIQFYLEEVMPQAENQDPDIKAHVNSLGENLKTLRLRLRRCHRFLPCENGGGSGGKSKAVEQVKNAFNKLQEKGIYKAMSEFDIFINYIEAYMTMKIRN

SEQ ID NO: 1056 - protein, 236 aa, synthetic construct
  REGION 1..236: note = Synthetic
MDMRVPAQLLGLLLLWLRGARCDIQMTQSPSSLSASVGDRVTITCRASQSISSNLNWYQQKPGKAPKLLISAASNLQSGVPSRFSGSESGTDFTLTISSLQSEDFATYYCQQSDSLPLTFGGGTKVEIKRTVAAPSVFIFPPSDEQLKSGTASVVCLLNNFYPREAKVQWKVDNALQSGNSQESVTEQDSKDSTYSLSSTLTLSKADYEKHKVYACEVTHQGLSSPVTKSFNRGEC

SEQ ID NO: 1057 - protein, 641 aa, synthetic construct
  REGION 1..641: note = Synthetic
MDMRVPAQLLGLLLLWLRGARCEVQLLESGGGLVQPGGSLRLSCAASGFTFSSYAMTWVRQAPGRGLQWVSTISGSGSNTYYADSVKGRFTISRDNSKNTLYLQMSSLRAEDTAVYYCAKEGGSNRYFHHWGQGTLVTISSASTKGPSVFPLAPSSKSTSGGTAALGCLVKDYFPEPVTVSWNSGALTSGVHTFPAVLQSSGLYSLSSVVTVPSSSLGTQTYICNVNHKPSNTKVDKKVEPKSCDKTHTCPPCPAPELLGGPSVFLFPPKPKDTLMISRTPEVTCVVVDVSHEDPEVKFNWYVDGVEVHNAKTKPCEEQYGSTYRCVSVLTVLHQDWLNGKEYKCKVSNKALPAPIEKTISKAKGQPREPQVYTLPPSREEMTKNQVSLTCLVKGFYPSDIAVEWESNGQPENNYKTTPPVLDSDGSFFLYSKLTVDKSRWQQGNVFSCSVMHEALHNHYTQKSLSLSPGGGGGSSPGQGTQSENSCTHFPGNLPNMLRDLRDAFSRVKTFFQMKDQLDNLLLKESLLEDFKGYLGCQALSEMIQFYLEEVMPQAENQDPDIKAHVNSLGENLKTLRLRLRRCHRFLPCENGGGSGGKSKAVEQVKNAFNKLQEKGIYLAMSEFDIFINYIEAYMTMKIRN

SEQ ID NO: 1058 - protein, 236 aa, synthetic construct; identical to SEQ ID NO: 1056
  REGION 1..236: note = Synthetic

SEQ ID NO: 1059 - protein, 641 aa, synthetic construct
  REGION 1..641: note = Synthetic
MDMRVPAQLLGLLLLWLRGARCEVQLLESGGGLVQPGGSLRLSCAASGFTFSSYAMTWVRQAPGRGLQWVSTISGSGSNTYYADSVKGRFTISRDNSKNTLYLQMSSLRAEDTAVYYCAKEGGSNRYFHHWGQGTLVTISSASTKGPSVFPLAPSSKSTSGGTAALGCLVKDYFPEPVTVSWNSGALTSGVHTFPAVLQSSGLYSLSSVVTVPSSSLGTQTYICNVNHKPSNTKVDKKVEPKSCDKTHTCPPCPAPELLGGPSVFLFPPKPKDTLMISRTPEVTCVVVDVSHEDPEVKFNWYVDGVEVHNAKTKPCEEQYGSTYRCVSVLTVLHQDWLNGKEYKCKVSNKALPAPIEKTISKAKGQPREPQVYTLPPSREEMTKNQVSLTCLVKGFYPSDIAVEWESNGQPENNYKTTPPVLDSDGSFFLYSKLTVDKSRWQQGNVFSCSVMHEALHNHYTQKSLSLSPGGGGGSSPGQGTQSENSCTHFPGNLPNMLRDLRDAFSRVKTFFQMKDQLDNLLLKESLLEDFKGYLGCQALSEMIQFYLEEVMPQAENQDPDIKAHVNSLGENLKTLRLRLRRCHRFLPCENGGGSGGKSKAVEQVKNAFNKLQEKGIYDAMSEFDIFINYIEAYMTMKIRN

SEQ ID NO: 1060 - protein, 236 aa, synthetic construct; identical to SEQ ID NO: 1056
  REGION 1..236: note = Synthetic

SEQ ID NO: 1061 - protein, 641 aa, synthetic construct
  REGION 1..641: note = Synthetic
MDMRVPAQLLGLLLLWLRGARCEVQLLESGGGLVQPGGSLRLSCAASGFTFSSYAMTWVRQAPGRGLQWVSTISGSGSNTYYADSVKGRFTISRDNSKNTLYLQMSSLRAEDTAVYYCAKEGGSNRYFHHWGQGTLVTISSASTKGPSVFPLAPSSKSTSGGTAALGCLVKDYFPEPVTVSWNSGALTSGVHTFPAVLQSSGLYSLSSVVTVPSSSLGTQTYICNVNHKPSNTKVDKKVEPKSCDKTHTCPPCPAPELLGGPSVFLFPPKPKDTLMISRTPEVTCVVVDVSHEDPEVKFNWYVDGVEVHNAKTKPCEEQYGSTYRCVSVLTVLHQDWLNGKEYKCKVSNKALPAPIEKTISKAKGQPREPQVYTLPPSREEMTKNQVSLTCLVKGFYPSDIAVEWESNGQPENNYKTTPPVLDSDGSFFLYSKLTVDKSRWQQGNVFSCSVMHEALHNHYTQKSLSLSPGGGGGSSPGQGTQSENSCTHFPGNLPNMLRDLRDAFSRVKTFFQMKGQLDNLLLKESLLEDFKGYLGCQALSEMIQFYLEEVMPQAENQDPDIKAHVNSLGENLKTLRLRLRRCHRFLPCENGGGSGGKSKAVEQVKNAFNKLQEKGIYKAMSEFDIFINYIEAYMTMKIRN

SEQ ID NO: 1062 - protein, 236 aa, synthetic construct; identical to SEQ ID NO: 1056
  REGION 1..236: note = Synthetic

SEQ ID NO: 1063 - protein, 641 aa, synthetic construct
  REGION 1..641: note = Synthetic
MDMRVPAQLLGLLLLWLRGARCEVQLLESGGGLVQPGGSLRLSCAASGFTFSSYAMTWVRQAPGRGLQWVSTISGSGSNTYYADSVKGRFTISRDNSKNTLYLQMSSLRAEDTAVYYCAKEGGSNRYFHHWGQGTLVTISSASTKGPSVFPLAPSSKSTSGGTAALGCLVKDYFPEPVTVSWNSGALTSGVHTFPAVLQSSGLYSLSSVVTVPSSSLGTQTYICNVNHKPSNTKVDKKVEPKSCDKTHTCPPCPAPELLGGPSVFLFPPKPKDTLMISRTPEVTCVVVDVSHEDPEVKFNWYVDGVEVHNAKTKPCEEQYGSTYRCVSVLTVLHQDWLNGKEYKCKVSNKALPAPIEKTISKAKGQPREPQVYTLPPSREEMTKNQVSLTCLVKGFYPSDIAVEWESNGQPENNYKTTPPVLDSDGSFFLYSKLTVDKSRWQQGNVFSCSVMHEALHNHYTQKSLSLSPGGGGGSSPGQGTQSENSCTHFPGNLPNMLRDLRDAFSRVKTFFRMKDQLDNLLLKESLLEDFKGYLGCQALSEMIQFYLEEVMPQAENQDPDIKAHVNSLGENLKTLRLRLRRCHRFLPCENGGGSGGKSKAVEQVKNAFNKLQEKGIYKAMSEFDIFINYIEAYMTMKIRN

SEQ ID NO: 1064 - protein, 236 aa, synthetic construct; identical to SEQ ID NO: 1056
  REGION 1..236: note = Synthetic

SEQ ID NO: 1065 - protein, 641 aa, synthetic construct
  REGION 1..641: note = Synthetic
MDMRVPAQLLGLLLLWLRGARCEVQLLESGGGLVQPGGSLRLSCAASGFTFSSYAMTWVRQAPGRGLQWVSTISGSGSNTYYADSVKGRFTISRDNSKNTLYLQMSSLRAEDTAVYYCAKEGGSNRYFHHWGQGTLVTISSASTKGPSVFPLAPSSKSTSGGTAALGCLVKDYFPEPVTVSWNSGALTSGVHTFPAVLQSSGLYSLSSVVTVPSSSLGTQTYICNVNHKPSNTKVDKKVEPKSCDKTHTCPPCPAPELLGGPSVFLFPPKPKDTLMISRTPEVTCVVVDVSHEDPEVKFNWYVDGVEVHNAKTKPCEEQYGSTYRCVSVLTVLHQDWLNGKEYKCKVSNKALPAPIEKTISKAKGQPREPQVYTLPPSREEMTKNQVSLTCLVKGFYPSDIAVEWESNGQPENNYKTTPPVLDSDGSFFLYSKLTVDKSRWQQGNVFSCSVMHEALHNHYTQKSLSLSPGGGGGSSPGQGTQSENSCTHFPGNLPNMLRDLRDAFSRVKTFFQMKDQLDNKLLKESLLEDFKGYLGCQALSEMIQFYLEEVMPQAENQDPDIKAHVNSLGENLKTLRLRLRRCHRFLPCENGGGSGGKSKAVEQVKNAFNKLQEKGIYKAMSEFDIFINYIEAYMTMKIRN

SEQ ID NO: 1066 - protein, 236 aa, synthetic construct; identical to SEQ ID NO: 1056
  REGION 1..236: note = Synthetic

SEQ ID NO: 1067 - protein, 641 aa, synthetic construct
  REGION 1..641: note = Synthetic
MDMRVPAQLLGLLLLWLRGARCEVQLLESGGGLVQPGGSLRLSCAASGFTFSSYAMTWVRQAPGRGLQWVSTISGSGSNTYYADSVKGRFTISRDNSKNTLYLQMSSLRAEDTAVYYCAKEGGSNRYFHHWGQGTLVTISSASTKGPSVFPLAPSSKSTSGGTAALGCLVKDYFPEPVTVSWNSGALTSGVHTFPAVLQSSGLYSLSSVVTVPSSSLGTQTYICNVNHKPSNTKVDKKVEPKSCDKTHTCPPCPAPELLGGPSVFLFPPKPKDTLMISRTPEVTCVVVDVSHEDPEVKFNWYVDGVEVHNAKTKPCEEQYGSTYRCVSVLTVLHQDWLNGKEYKCKVSNKALPAPIEKTISKAKGQPREPQVYTLPPSREEMTKNQVSLTCLVKGFYPSDIAVEWESNGQPENNYKTTPPVLDSDGSFFLYSKLTVDKSRWQQGNVFSCSVMHEALHNHYTQKSLSLSPGGGGGSSPGQGTQSENSCTHFPGNLPNMLRDLRDAFSRVDTFFQMKDQLDNLLLKESLLEDFKGYLGCQALSEMIQFYLEEVMPQAENQDPDIKAHVNSLGENLKTLRLRLRRCHRFLPCENGGGSGGKSKAVEQVKNAFNKLQEKGIYKAMSEFDIFINYIEAYMTMKIRN

SEQ ID NO: 1068 - protein, 236 aa, synthetic construct; identical to SEQ ID NO: 1056
  REGION 1..236: note = Synthetic

SEQ ID NO: 1069 - protein, 641 aa, synthetic construct
  REGION 1..641: note = Synthetic
MDMRVPAQLLGLLLLWLRGARCEVQLLESGGGLVQPGGSLRLSCAASGFTFSSYAMTWVRQAPGRGLQWVSTISGSGSNTYYADSVKGRFTISRDNSKNTLYLQMSSLRAEDTAVYYCAKEGGSNRYFHHWGQGTLVTISSASTKGPSVFPLAPSSKSTSGGTAALGCLVKDYFPEPVTVSWNSGALTSGVHTFPAVLQSSGLYSLSSVVTVPSSSLGTQTYICNVNHKPSNTKVDKKVEPKSCDKTHTCPPCPAPELLGGPSVFLFPPKPKDTLMISRTPEVTCVVVDVSHEDPEVKFNWYVDGVEVHNAKTKPCEEQYGSTYRCVSVLTVLHQDWLNGKEYKCKVSNKALPAPIEKTISKAKGQPREPQVYTLPPSREEMTKNQVSLTCLVKGFYPSDIAVEWESNGQPENNYKTTPPVLDSDGSFFLYSKLTVDKSRWQQGNVFSCSVMHEALHNHYTQKSLSLSPGGGGGSSPGQGTQSENSCTHFPGNLPNMLRDLRDAFSRVKTFFEMKDQLDNLLLKESLLEDFKGYLGCQALSEMIQFYLEEVMPQAENQDPDIKAHVNSLGENLKTLRLRLRRCHRFLPCENGGGSGGKSKAVEQVKNAFNKLQEKGIYKAMSEFDIFINYIEAYMTMKIRN

SEQ ID NO: 1070 - protein, 236 aa, synthetic construct; identical to SEQ ID NO: 1056
  REGION 1..236: note = Synthetic

SEQ ID NO: 1071 - protein, 644 aa, synthetic construct
  REGION 1..644: note = Synthetic
MDMRVPAQLLGLLLLWLRGARCQVQLVQSGAEVKKPGASVKVSCKASGYTFTRYDINWVRQATGQGLEWMGWMNPNSGNSGSVQKFRGRVTMTRDTSIHIAYMELSSLRSEDTAVYYCARGGYTSSWRWYFDLWGRGTLVTVSSASTKGPSVFPLAPSSKSTSGGTAALGCLVKDYFPEPVTVSWNSGALTSGVHTFPAVLQSSGLYSLSSVVTVPSSSLGTQTYICNVNHKPSNTKVDKKVEPKSCDKTHTCPPCPAPELLGGPSVFLFPPKPKDTLMISRTPEVTCVVVDVSHEDPEVKFNWYVDGVEVHNAKTKPCEEQYGSTYRCVSVLTVLHQDWLNGKEYKCKVSNKALPAPIEKTISKAKGQPREPQVYTLPPSREEMTKNQVSLTCLVKGFYPSDIAVEWESNGQPENNYKTTPPVLDSDGSFFLYSKLTVDKSRWQQGNVFSCSVMHEALHNHYTQKSLSLSPGGGGGSSPGQGTQSENSCTHFPGNLPNMLRDLLDAFSRVKTFFQMKDQLDNLLLKESLLEDFKGYLGCQALSEMIQFYLEEVMPQAENQDPDIKAHVNSLGENLKTLRLRLRRCHRFLPCENGGGSGGKSKAVEQVKNAFNKLQEKGIYKAMSEFDIFINYIEAYMTMKIRN

SEQ ID NO: 1072 - protein, 236 aa, synthetic construct
  REGION 1..236: note = Synthetic
MDMRVPAQLLGLLLLWLRGARCDIQMTQSPSSLSASVGDRVTITCQASQDIRKHLNWYQQKPGKAPNLLIYDAANLETGVPSRFSGSGSGTAFTFTISSLQPEDIATYYCQHYANLPITFGQGTRLEIKRTVAAPSVFIFPPSDEQLKSGTASVVCLLNNFYPREAKVQWKVDNALQSGNSQESVTEQDSKDSTYSLSSTLTLSKADYEKHKVYACEVTHQGLSSPVTKSFNRGEC

SEQ ID NO: 1073 - protein, 644 aa, synthetic construct
  REGION 1..644: note = Synthetic
MDMRVPAQLLGLLLLWLRGARCQVQLVQSGAEVKKPGASVKVSCKASGYTFTRYDINWVRQATGQGLEWMGWMNPNSGNSGSVQKFRGRVTMTRDTSIHIAYMELSSLRSEDTAVYYCARGGYTSSWRWYFDLWGRGTLVTVSSASTKGPSVFPLAPSSKSTSGGTAALGCLVKDYFPEPVTVSWNSGALTSGVHTFPAVLQSSGLYSLSSVVTVPSSSLGTQTYICNVNHKPSNTKVDKKVEPKSCDKTHTCPPCPAPELLGGPSVFLFPPKPKDTLMISRTPEVTCVVVDVSHEDPEVKFNWYVDGVEVHNAKTKPCEEQYGSTYRCVSVLTVLHQDWLNGKEYKCKVSNKALPAPIEKTISKAKGQPREPQVYTLPPSREEMTKNQVSLTCLVKGFYPSDIAVEWESNGQPENNYKTTPPVLDSDGSFFLYSKLTVDKSRWQQGNVFSCSVMHEALHNHYTQKSLSLSPGGGGGSSPGQGTQSENSCTHFPGNLPNMLRDLRDAFSRVKTFFQMKDQLDNLLLKESLLEDFKGYLGCQALSEMIQFYLEEVMPQAENQDPDIKAHVNSLGENLKTLRLRLRRCHRFLPCENGGGSGGKSKAVEQVKNAFNKLQEKGIYLAMSEFDIFINYIEAYMTMKIRN

SEQ ID NO: 1074 - protein, 236 aa, synthetic construct; identical to SEQ ID NO: 1072
  REGION 1..236: note = Synthetic

SEQ ID NO: 1075 - protein, 644 aa, synthetic construct
  REGION 1..644: note = Synthetic
MDMRVPAQLLGLLLLWLRGARCQVQLVQSGAEVKKPGASVKVSCKASGYTFTRYDINWVRQATGQGLEWMGWMNPNSGNSGSVQKFRGRVTMTRDTSIHIAYMELSSLRSEDTAVYYCARGGYTSSWRWYFDLWGRGTLVTVSSASTKGPSVFPLAPSSKSTSGGTAALGCLVKDYFPEPVTVSWNSGALTSGVHTFPAVLQSSGLYSLSSVVTVPSSSLGTQTYICNVNHKPSNTKVDKKVEPKSCDKTHTCPPCPAPELLGGPSVFLFPPKPKDTLMISRTPEVTCVVVDVSHEDPEVKFNWYVDGVEVHNAKTKPCEEQYGSTYRCVSVLTVLHQDWLNGKEYKCKVSNKALPAPIEKTISKAKGQPREPQVYTLPPSREEMTKNQVSLTCLVKGFYPSDIAVEWESNGQPENNYKTTPPVLDSDGSFFLYSKLTVDKSRWQQGNVFSCSVMHEALHNHYTQKSLSLSPGGGGGSSPGQGTQSENSCTHFPGNLPNMLRDLRDAFSRVKTFFQMKDQLDNLLLKESLLEDFKGYLGCQALSEMIQFYLEEVMPQAENQDPDIKAHVNSLGENLKTLRLRLRRCHRFLPCENGGGSGGKSKAVEQVKNAFNKLQEKGIYDAMSEFDIFINYIEAYMTMKIRN

SEQ ID NO: 1076 - protein, 236 aa, synthetic construct; identical to SEQ ID NO: 1072
  REGION 1..236: note = Synthetic

SEQ ID NO: 1077 - protein, 644 aa, synthetic construct
  REGION 1..644: note = Synthetic
MDMRVPAQLLGLLLLWLRGARCQVQLVQSGAEVKKPGASVKVSCKASGYTFTRYDINWVRQATGQGLEWMGWMNPNSGNSGSVQKFRGRVTMTRDTSIHIAYMELSSLRSEDTAVYYCARGGYTSSWRWYFDLWGRGTLVTVSSASTKGPSVFPLAPSSKSTSGGTAALGCLVKDYFPEPVTVSWNSGALTSGVHTFPAVLQSSGLYSLSSVVTVPSSSLGTQTYICNVNHKPSNTKVDKKVEPKSCDKTHTCPPCPAPELLGGPSVFLFPPKPKDTLMISRTPEVTCVVVDVSHEDPEVKFNWYVDGVEVHNAKTKPCEEQYGSTYRCVSVLTVLHQDWLNGKEYKCKVSNKALPAPIEKTISKAKGQPREPQVYTLPPSREEMTKNQVSLTCLVKGFYPSDIAVEWESNGQPENNYKTTPPVLDSDGSFFLYSKLTVDKSRWQQGNVFSCSVMHEALHNHYTQKSLSLSPGGGGGSSPGQGTQSENSCTHFPGNLPNMLRDLRDAFSRVKTFFQMKGQLDNLLLKESLLEDFKGYLGCQALSEMIQFYLEEVMPQAENQDPDIKAHVNSLGENLKTLRLRLRRCHRFLPCENGGGSGGKSKAVEQVKNAFNKLQEKGIYKAMSEFDIFINYIEAYMTMKIRN

SEQ ID NO: 1078 - protein, 236 aa, synthetic construct; identical to SEQ ID NO: 1072
  REGION 1..236: note = Synthetic

SEQ ID NO: 1079 - protein, 644 aa, synthetic construct
  REGION 1..644: note = Synthetic
MDMRVPAQLLGLLLLWLRGARCQVQLVQSGAEVKKPGASVKVSCKASGYTFTRYDINWVRQATGQGLEWMGWMNPNSGNSGSVQKFRGRVTMTRDTSIHIAYMELSSLRSEDTAVYYCARGGYTSSWRWYFDLWGRGTLVTVSSASTKGPSVFPLAPSSKSTSGGTAALGCLVKDYFPEPVTVSWNSGALTSGVHTFPAVLQSSGLYSLSSVVTVPSSSLGTQTYICNVNHKPSNTKVDKKVEPKSCDKTHTCPPCPAPELLGGPSVFLFPPKPKDTLMISRTPEVTCVVVDVSHEDPEVKFNWYVDGVEVHNAKTKPCEEQYGSTYRCVSVLTVLHQDWLNGKEYKCKVSNKALPAPIEKTISKAKGQPREPQVYTLPPSREEMTKNQVSLTCLVKGFYPSDIAVEWESNGQPENNYKTTPPVLDSDGSFFLYSKLTVDKSRWQQGNVFSCSVMHEALHNHYTQKSLSLSPGGGGGSSPGQGTQSENSCTHFPGNLPNMLRDLRDAFSRVKTFFRMKDQLDNLLLKESLLEDFKGYLGCQALSEMIQFYLEEVMPQAENQDPDIKAHVNSLGENLKTLRLRLRRCHRFLPCENGGGSGGKSKAVEQVKNAFNKLQEKGIYKAMSEFDIFINYIEAYMTMKIRN

SEQ ID NO: 1080 - protein, 236 aa, synthetic construct; identical to SEQ ID NO: 1072
  REGION 1..236: note = Synthetic

SEQ ID NO: 1081 - protein, 644 aa, synthetic construct
  REGION 1..644: note = Synthetic
MDMRVPAQLLGLLLLWLRGARCQVQLVQSGAEVKKPGASVKVSCKASGYTFTRYDINWVRQATGQGLEWMGWMNPNSGNSGSVQKFRGRVTMTRDTSIHIAYMELSSLRSEDTAVYYCARGGYTSSWRWYFDLWGRGTLVTVSSASTKGPSVFPLAPSSKSTSGGTAALGCLVKDYFPEPVTVSWNSGALTSGVHTFPAVLQSSGLYSLSSVVTVPSSSLGTQTYICNVNHKPSNTKVDKKVEPKSCDKTHTCPPCPAPELLGGPSVFLFPPKPKDTLMISRTPEVTCVVVDVSHEDPEVKFNWYVDGVEVHNAKTKPCEEQYGSTYRCVSVLTVLHQDWLNGKEYKCKVSNKALPAPIEKTISKAKGQPREPQVYTLPPSREEMTKNQVSLTCLVKGFYPSDIAVEWESNGQPENNYKTTPPVLDSDGSFFLYSKLTVDKSRWQQGNVFSCSVMHEALHNHYTQKSLSLSPGGGGGSSPGQGTQSENSCTHFPGNLPNMLRDLRDAFSRVKTFFQMKDQLDNKLLKESLLEDFKGYLGCQALSEMIQFYLEEVMPQAENQDPDIKAHVNSLGENLKTLRLRLRRCHRFLPCENGGGSGGKSKAVEQVKNAFNKLQEKGIYKAMSEFDIFINYIEAYMTMKIRN

SEQ ID NO: 1082 - protein, 236 aa, synthetic construct; identical to SEQ ID NO: 1072
  REGION 1..236: note = Synthetic

SEQ ID NO: 1083 - protein, 644 aa, synthetic construct
  REGION 1..644: note = Synthetic
MDMRVPAQLLGLLLLWLRGARCQVQLVQSGAEVKKPGASVKVSCKASGYTFTRYDINWVRQATGQGLEWMGWMNPNSGNSGSVQKFRGRVTMTRDTSIHIAYMELSSLRSEDTAVYYCARGGYTSSWRWYFDLWGRGTLVTVSSASTKGPSVFPLAPSSKSTSGGTAALGCLVKDYFPEPVTVSWNSGALTSGVHTFPAVLQSSGLYSLSSVVTVPSSSLGTQTYICNVNHKPSNTKVDKKVEPKSCDKTHTCPPCPAPELLGGPSVFLFPPKPKDTLMISRTPEVTCVVVDVSHEDPEVKFNWYVDGVEVHNAKTKPCEEQYGSTYRCVSVLTVLHQDWLNGKEYKCKVSNKALPAPIEKTISKAKGQPREPQVYTLPPSREEMTKNQVSLTCLVKGFYPSDIAVEWESNGQPENNYKTTPPVLDSDGSFFLYSKLTVDKSRWQQGNVFSCSVMHEALHNHYTQKSLSLSPGGGGGSSPGQGTQSENSCTHFPGNLPNMLRDLRDAFSRVDTFFQMKDQLDNLLLKESLLEDFKGYLGCQALSEMIQFYLEEVMPQAENQDPDIKAHVNSLGENLKTLRLRLRRCHRFLPCENGGGSGGKSKAVEQVKNAFNKLQEKGIYKAMSEFDIFINYIEAYMTMKIRN

SEQ ID NO: 1084 - protein, 236 aa, synthetic construct; identical to SEQ ID NO: 1072
  REGION 1..236: note = Synthetic

SEQ ID NO: 1085 - protein, 644 aa, synthetic construct
  REGION 1..644: note = Synthetic
MDMRVPAQLLGLLLLWLRGARCQVQLVQSGAEVKKPGASVKVSCKASGYTFTRYDINWVRQATGQGLEWMGWMNPNSGNSGSVQKFRGRVTMTRDTSIHIAYMELSSLRSEDTAVYYCARGGYTSSWRWYFDLWGRGTLVTVSSASTKGPSVFPLAPSSKSTSGGTAALGCLVKDYFPEPVTVSWNSGALTSGVHTFPAVLQSSGLYSLSSVVTVPSSSLGTQTYICNVNHKPSNTKVDKKVEPKSCDKTHTCPPCPAPELLGGPSVFLFPPKPKDTLMISRTPEVTCVVVDVSHEDPEVKFNWYVDGVEVHNAKTKPCEEQYGSTYRCVSVLTVLHQDWLNGKEYKCKVSNKALPAPIEKTISKAKGQPREPQVYTLPPSREEMTKNQVSLTCLVKGFYPSDIAVEWESNGQPENNYKTTPPVLDSDGSFFLYSKLTVDKSRWQQGNVFSCSVMHEALHNHYTQKSLSLSPGGGGGSSPGQGTQSENSCTHFPGNLPNMLRDLRDAFSRVKTFFEMKDQLDNLLLKESLLEDFKGYLGCQALSEMIQFYLEEVMPQAENQDPDIKAHVNSLGENLKTLRLRLRRCHRFLPCENGGGSGGKSKAVEQVKNAFNKLQEKGIYKAMSEFDIFINYIEAYMTMKIRN

SEQ ID NO: 1086 - protein, 236 aa, synthetic construct; identical to SEQ ID NO: 1072
  REGION 1..236: note = Synthetic

SEQ ID NO: 1087 - protein, 641 aa, synthetic construct
  REGION 1..641: note = Synthetic
MDMRVPAQLLGLLLLWLRGARCEVQVLESGGGLVQPGESLRLSCTASGFTFNAYAMSWVRQAPGKGLEWVSTISGSGSTTYYADSVKGRFTISRDNSKNTLDLQMNSLRAADTAVYYCAKVAGSNFFFDHWGQGTLVTVSSASTKGPSVFPLAPSSKSTSGGTAALGCLVKDYFPEPVTVSWNSGALTSGVHTFPAVLQSSGLYSLSSVVTVPSSSLGTQTYICNVNHKPSNTKVDKKVEPKSCDKTHTCPPCPAPELLGGPSVFLFPPKPKDTLMISRTPEVTCVVVDVSHEDPEVKFNWYVDGVEVHNAKTKPCEEQYGSTYRCVSVLTVLHQDWLNGKEYKCKVSNKALPAPIEKTISKAKGQPREPQVYTLPPSRKEMTKNQVSLTCLVKGFYPSDIAVEWESNGQPENNYKTTPPVLKSDGSFFLYSKLTVDKSRWQQGNVFSCSVMHEALHNHYTQKSLSLSPGGGGGSSPGQGTQSENSCTHFPGNLPNMLRDLLDAFSRVKTFFQMKDQLDNLLLKESLLEDFKGYLGCQALSEMIQFYLEEVMPQAENQDPDIKAHVNSLGENLKTLRLRLRRCHRFLPCENGGGSGGKSKAVEQVKNAFNKLQEKGIYKAMSEFDIFINYIEAYMTMKIRN

SEQ ID NO: 1088 - protein, 237 aa, synthetic construct; identical to SEQ ID NO: 864
  REGION 1..237: note = Synthetic

SEQ ID NO: 1089 - protein, 419 aa, synthetic construct
  REGION 1..419: note = Synthetic
MDMRVPAQLLGLLLLWLRGARCDKTHTCPPCPAPELLGGPSVFLFPPKPKDTLMISRTPEVTCVVVDVSHEDPEVKFNWYVDGVEVHNAKTKPCEEQYGSTYRCVSVLTVLHQDWLNGKEYKCKVSNKALPAPIEKTISKAKGQPREPQVYTLPPSREEMTKNQVSLTCLVKGFYPSDIAVEWESNGQPENNYDTTPPVLDSDGSFFLYSDLTVDKSRWQQGNVFSCSVMHEALHNHYTQDSLSLSPGGGGGSSPGQGTQSENSCTHFPGNLPNMLRDLLDAFSRVKTFFQMKDQLDNLLLKESLLEDFKGYLGCQALSEMIQFYLEEVMPQAENQDPDIKAHVNSLGENLKTLRLRLRRCHRFLPCENGGGSGGKSKAVEQVKNAFNKLQEKGIYKAMSEFDIFINYIEAYMTMKIRN

SEQ ID NO: 1090 - protein, 641 aa, synthetic construct
  REGION 1..641: note = Synthetic
MDMRVPAQLLGLLLLWLRGARCEVQVLESGGGLVQPGESLRLSCTASGFTFNAYAMSWVRQAPGKGLEWVSTISGSGSTTYYADSVKGRFTISRDNSKNTLDLQMNSLRAADTAVYYCAKVAGSNFFFDHWGQGTLVTVSSASTKGPSVFPLAPSSKSTSGGTAALGCLVKDYFPEPVTVSWNSGALTSGVHTFPAVLQSSGLYSLSSVVTVPSSSLGTQTYICNVNHKPSNTKVDKKVEPKSCDKTHTCPPCPAPELLGGPSVFLFPPKPKDTLMISRTPEVTCVVVDVSHEDPEVKFNWYVDGVEVHNAKTKPCEEQYGSTYRCVSVLTVLHQDWLNGKEYKCKVSNKALPAPIEKTISKAKGQPREPQVYTLPPSRKEMTKNQVSLTCLVKGFYPSDIAVEWESNGQPENNYKTTPPVLKSDGSFFLYSKLTVDKSRWQQGNVFSCSVMHEALHNHYTQKSLSLSPGGGGGSSPGQGTQSENSCTHFPGNLPNMLRDLRDAFSRVKTFFQMKDQLDNLLLKESLLEDFKGYLGCQALSEMIQFYLEEVMPQAENQDPDIKAHVNSLGENLKTLRLRLRRCHRFLPCENGGGSGGKSKAVEQVKNAFNKLQEKGIYLAMSEFDIFINYIEAYMTMKIRN

SEQ ID NO: 1091 - protein, 237 aa, synthetic construct; identical to SEQ ID NO: 864
  REGION 1..237: note = Synthetic

SEQ ID NO: 1092 - protein, 419 aa, synthetic construct
  REGION 1..419: note = Synthetic
MDMRVPAQLLGLLLLWLRGARCDKTHTCPPCPAPELLGGPSVFLFPPKPKDTLMISRTPEVTCVVVDVSHEDPEVKFNWYVDGVEVHNAKTKPCEEQYGSTYRCVSVLTVLHQDWLNGKEYKCKVSNKALPAPIEKTISKAKGQPREPQVYTLPPSREEMTKNQVSLTCLVKGFYPSDIAVEWESNGQPENNYDTTPPVLDSDGSFFLYSDLTVDKSRWQQGNVFSCSVMHEALHNHYTQDSLSLSPGGGGGSSPGQGTQSENSCTHFPGNLPNMLRDLRDAFSRVKTFFQMKDQLDNLLLKESLLEDFKGYLGCQALSEMIQFYLEEVMPQAENQDPDIKAHVNSLGENLKTLRLRLRRCHRFLPCENGGGSGGKSKAVEQVKNAFNKLQEKGIYLAMSEFDIFINYIEAYMTMKIRN

SEQ ID NO: 1093 - protein, 641 aa, synthetic construct
  REGION 1..641: note = Synthetic
MDMRVPAQLLGLLLLWLRGARCEVQVLESGGGLVQPGESLRLSCTASGFTFNAYAMSWVRQAPGKGLEWVSTISGSGSTTYYADSVKGRFTISRDNSKNTLDLQMNSLRAADTAVYYCAKVAGSNFFFDHWGQGTLVTVSSASTKGPSVFPLAPSSKSTSGGTAALGCLVKDYFPEPVTVSWNSGALTSGVHTFPAVLQSSGLYSLSSVVTVPSSSLGTQTYICNVNHKPSNTKVDKKVEPKSCDKTHTCPPCPAPELLGGPSVFLFPPKPKDTLMISRTPEVTCVVVDVSHEDPEVKFNWYVDGVEVHNAKTKPCEEQYGSTYRCVSVLTVLHQDWLNGKEYKCKVSNKALPAPIEKTISKAKGQPREPQVYTLPPSRKEMTKNQVSLTCLVKGFYPSDIAVEWESNGQPENNYKTTPPVLKSDGSFFLYSKLTVDKSRWQQGNVFSCSVMHEALHNHYTQKSLSLSPGGGGGSSPGQGTQSENSCTHFPGNLPNMLRDLRDAFSRVKTFFQMKDQLDNLLLKESLLEDFKGYLGCQALSEMIQFYLEEVMPQAENQDPDIKAHVNSLGENLKTLRLRLRRCHRFLPCENGGGSGGKSKAVEQVKNAFNKLQEKGIYDAMSEFDIFINYIEAYMTMKIRN

SEQ ID NO: 1094 - protein, 237 aa, synthetic construct; identical to SEQ ID NO: 864
  REGION 1..237: note = Synthetic

SEQ ID NO: 1095 - protein, 419 aa, synthetic construct
  REGION 1..419: note = Synthetic
MDMRVPAQLLGLLLLWLRGARCDKTHTCPPCPAPELLGGPSVFLFPPKPKDTLMISRTPEVTCVVVDVSHEDPEVKFNWYVDGVEVHNAKTKPCEEQYGSTYRCVSVLTVLHQDWLNGKEYKCKVSNKALPAPIEKTISKAKGQPREPQVYTLPPSREEMTKNQVSLTCLVKGFYPSDIAVEWESNGQPENNYDTTPPVLDSDGSFFLYSDLTVDKSRWQQGNVFSCSVMHEALHNHYTQDSLSLSPGGGGGSSPGQGTQSENSCTHFPGNLPNMLRDLRDAFSRVKTFFQMKDQLDNLLLKESLLEDFKGYLGCQALSEMIQFYLEEVMPQAENQDPDIKAHVNSLGENLKTLRLRLRRCHRFLPCENGGGSGGKSKAVEQVKNAFNKLQEKGIYDAMSEFDIFINYIEAYMTMKIRN

SEQ ID NO: 1096 - protein, 641 aa, synthetic construct
  REGION 1..641: note = Synthetic
MDMRVPAQLLGLLLLWLRGARCEVQVLESGGGLVQPGESLRLSCTASGFTFNAYAMSWVRQAPGKGLEWVSTISGSGSTTYYADSVKGRFTISRDNSKNTLDLQMNSLRAADTAVYYCAKVAGSNFFFDHWGQGTLVTVSSASTKGPSVFPLAPSSKSTSGGTAALGCLVKDYFPEPVTVSWNSGALTSGVHTFPAVLQSSGLYSLSSVVTVPSSSLGTQTYICNVNHKPSNTKVDKKVEPKSCDKTHTCPPCPAPELLGGPSVFLFPPKPKDTLMISRTPEVTCVVVDVSHEDPEVKFNWYVDGVEVHNAKTKPCEEQYGSTYRCVSVLTVLHQDWLNGKEYKCKVSNKALPAPIEKTISKAKGQPREPQVYTLPPSRKEMTKNQVSLTCLVKGFYPSDIAVEWESNGQPENNYKTTPPVLKSDGSFFLYSKLTVDKSRWQQGNVFSCSVMHEALHNHYTQKSLSLSPGGGGGSSPGQGTQSENSCTHFPGNLPNMLRDLRDAFSRVKTFFQMKGQLDNLLLKESLLEDFKGYLGCQALSEMIQFYLEEVMPQAENQDPDIKAHVNSLGENLKTLRLRLRRCHRFLPCENGGGSGGKSKAVEQVKNAFNKLQEKGIYKAMSEFDIFINYIEAYMTMKIRN

SEQ ID NO: 1097 - protein, 237 aa, synthetic construct; identical to SEQ ID NO: 864
  REGION 1..237: note = Synthetic

SEQ ID NO: 1098 - protein, 419 aa, synthetic construct
  REGION 1..419: note = Synthetic
MDMRVPAQLLGLLLLWLRGARCDKTHTCPPCPAPELLGGPSVFLFPPKPKDTLMISRTPEVTCVVVDVSHEDPEVKFNWYVDGVEVHNAKTKPCEEQYGSTYRCVSVLTVLHQDWLNGKEYKCKVSNKALPAPIEKTISKAKGQPREPQVYTLPPSREEMTKNQVSLTCLVKGFYPSDIAVEWESNGQPENNYDTTPPVLDSDGSFFLYSDLTVDKSRWQQGNVFSCSVMHEALHNHYTQDSLSLSPGGGGGSSPGQGTQSENSCTHFPGNLPNMLRDLRDAFSRVKTFFQMKGQLDNLLLKESLLEDFKGYLGCQALSEMIQFYLEEVMPQAENQDPDIKAHVNSLGENLKTLRLRLRRCHRFLPCENGGGSGGKSKAVEQVKNAFNKLQEKGIYKAMSEFDIFINYIEAYMTMKIRN

SEQ ID NO: 1099 - protein, 641 aa, synthetic construct
  REGION 1..641: note = Synthetic
MDMRVPAQLLGLLLLWLRGARCEVQVLESGGGLVQPGESLRLSCTASGFTFNAYAMSWVRQAPGKGLEWVSTISGSGSTTYYADSVKGRFTISRDNSKNTLDLQMNSLRAADTAVYYCAKVAGSNFFFDHWGQGTLVTVSSASTKGPSVFPLAPSSKSTSGGTAALGCLVKDYFPEPVTVSWNSGALTSGVHTFPAVLQSSGLYSLSSVVTVPSSSLGTQTYICNVNHKPSNTKVDKKVEPKSCDKTHTCPPCPAPELLGGPSVFLFPPKPKDTLMISRTPEVTCVVVDVSHEDPEVKFNWYVDGVEVHNAKTKPCEEQYGSTYRCVSVLTVLHQDWLNGKEYKCKVSNKALPAPIEKTISKAKGQPREPQVYTLPPSRKEMTKNQVSLTCLVKGFYPSDIAVEWESNGQPENNYKTTPPVLKSDGSFFLYSKLTVDKSRWQQGNVFSCSVMHEALHNHYTQKSLSLSPGGGGGSSPGQGTQSENSCTHFPGNLPNMLRDLRDAFSRVKTFFRMKDQLDNLLLKESLLEDFKGYLGCQALSEMIQFYLEEVMPQAENQDPDIKAHVNSLGENLKTLRLRLRRCHRFLPCENGGGSGGKSKAVEQVKNAFNKLQEKGIYKAMSEFDIFINYIEAYMTMKIRN

SEQ ID NO: 1100 - protein, 237 aa, synthetic construct; identical to SEQ ID NO: 864
  REGION 1..237: note = Synthetic

SEQ ID NO: 1101 - protein, 419 aa, synthetic construct
  REGION 1..419: note = Synthetic
MDMRVPAQLLGLLLLWLRGARCDKTHTCPPCPAPELLGGPSVFLFPPKPKDTLMISRTPEVTCVVVDVSHEDPEVKFNWYVDGVEVHNAKTKPCEEQYGSTYRCVSVLTVLHQDWLNGKEYKCKVSNKALPAPIEKTISKAKGQPREPQVYTLPPSREEMTKNQVSLTCLVKGFYPSDIAVEWESNGQPENNYDTTPPVLDSDGSFFLYSDLTVDKSRWQQGNVFSCSVMHEALHNHYTQDSLSLSPGGGGGSSPGQGTQSENSCTHFPGNLPNMLRDLRDAFSRVKTFFRMKDQLDNLLLKESLLEDFKGYLGCQALSEMIQFYLEEVMPQAENQDPDIKAHVNSLGENLKTLRLRLRRCHRFLPCENGGGSGGKSKAVEQVKNAFNKLQEKGIYKAMSEFDIFINYIEAYMTMKIRN

SEQ ID NO: 1102 - protein, 641 aa, synthetic construct
  REGION 1..641: note = Synthetic
MDMRVPAQLLGLLLLWLRGARCEVQVLESGGGLVQPGESLRLSCTASGFTFNAYAMSWVRQAPGKGLEWVSTISGSGSTTYYADSVKGRFTISRDNSKNTLDLQMNSLRAADTAVYYCAKVAGSNFFFDHWGQGTLVTVSSASTKGPSVFPLAPSSKSTSGGTAALGCLVKDYFPEPVTVSWNSGALTSGVHTFPAVLQSSGLYSLSSVVTVPSSSLGTQTYICNVNHKPSNTKVDKKVEPKSCDKTHTCPPCPAPELLGGPSVFLFPPKPKDTLMISRTPEVTCVVVDVSHEDPEVKFNWYVDGVEVHNAKTKPCEEQYGSTYRCVSVLTVLHQDWLNGKEYKCKVSNKALPAPIEKTISKAKGQPREPQVYTLPPSRKEMTKNQVSLTCLVKGFYPSDIAVEWESNGQPENNYKTTPPVLKSDGSFFLYSKLTVDKSRWQQGNVFSCSVMHEALHNHYTQKSLSLSPGGGGGSSPGQGTQSENSCTHFPGNLPNMLRDLRDAFSRVKTFFQMKDQLDNKLLKESLLEDFKGYLGCQALSEMIQFYLEEVMPQAENQDPDIKAHVNSLGENLKTLRLRLRRCHRFLPCENGGGSGGKSKAVEQVKNAFNKLQEKGIYKAMSEFDIFINYIEAYMTMKIRN

SEQ ID NO: 1103 - protein, 237 aa, synthetic construct; identical to SEQ ID NO: 864
  REGION 1..237: note = Synthetic

SEQ ID NO: 1104 - protein, 419 aa, synthetic construct
  REGION 1..419: note = Synthetic
MDMRVPAQLLGLLLLWLRGARCDKTHTCPPCPAPELLGGPSVFLFPPKPKDTLMISRTPEVTCVVVDVSHEDPEVKFNWYVDGVEVHNAKTKPCEEQYGSTYRCVSVLTVLHQDWLNGKEYKCKVSNKALPAPIEKTISKAKGQPREPQVYTLPPSREEMTKNQVSLTCLVKGFYPSDIAVEWESNGQPENNYDTTPPVLDSDGSFFLYSDLTVDKSRWQQGNVFSCSVMHEALHNHYTQDSLSLSPGGGGGSSPGQGTQSENSCTHFPGNLPNMLRDLRDAFSRVKTFFQMKDQLDNKLLKESLLEDFKGYLGCQALSEMIQFYLEEVMPQAENQDPDIKAHVNSLGENLKTLRLRLRRCHRFLPCENGGGSGGKSKAVEQVKNAFNKLQEKGIYKAMSEFDIFINYIEAYMTMKIRN

SEQ ID NO: 1105 - protein, 641 aa, synthetic construct
  REGION 1..641: note = Synthetic
MDMRVPAQLLGLLLLWLRGARCEVQVLESGGGLVQPGESLRLSCTASGFTFNAYAMSWVRQAPGKGLEWVSTISGSGSTTYYADSVKGRFTISRDNSKNTLDLQMNSLRAADTAVYYCAKVAGSNFFFDHWGQGTLVTVSSASTKGPSVFPLAPSSKSTSGGTAALGCLVKDYFPEPVTVSWNSGALTSGVHTFPAVLQSSGLYSLSSVVTVPSSSLGTQTYICNVNHKPSNTKVDKKVEPKSCDKTHTCPPCPAPELLGGPSVFLFPPKPKDTLMISRTPEVTCVVVDVSHEDPEVKFNWYVDGVEVHNAKTKPCEEQYGSTYRCVSVLTVLHQDWLNGKEYKCKVSNKALPAPIEKTISKAKGQPREPQVYTLPPSRKEMTKNQVSLTCLVKGFYPSDIAVEWESNGQPENNYKTTPPVLKSDGSFFLYSKLTVDKSRWQQGNVFSCSVMHEALHNHYTQKSLSLSPGGGGGSSPGQGTQSENSCTHFPGNLPNMLRDLRDAFSRVDTFFQMKDQLDNLLLKESLLEDFKGYLGCQALSEMIQFYLEEVMPQAENQDPDIKAHVNSLGENLKTLRLRLRRCHRFLPCENGGGSGGKSKAVEQVKNAFNKLQEKGIYKAMSEFDIFINYIEAYMTMKIRN

SEQ ID NO: 1106 - protein, 237 aa, synthetic construct; identical to SEQ ID NO: 864
  REGION 1..237: note = Synthetic

SEQ ID NO: 1107 - protein, 419 aa, synthetic construct
  REGION 1..419: note = Synthetic
MDMRVPAQLLGLLLLWLRGARCDKTHTCPPCPAPELLGGPSVFLFPPKPKDTLMISRTPEVTCVVVDVSHEDPEVKFNWYVDGVEVHNAKTKPCEEQYGSTYRCVSVLTVLHQDWLNGKEYKCKVSNKALPAPIEKTISKAKGQPREPQVYTLPPSREEMTKNQVSLTCLVKGFYPSDIAVEWESNGQPENNYDTTPPVLDSDGSFFLYSDLTVDKSRWQQGNVFSCSVMHEALHNHYTQDSLSLSPGGGGGSSPGQGTQSENSCTHFPGNLPNMLRDLRDAFSRVDTFFQMKDQLDNLLLKESLLEDFKGYLGCQALSEMIQFYLEEVMPQAENQDPDIKAHVNSLGENLKTLRLRLRRCHRFLPCENGGGSGGKSKAVEQVKNAFNKLQEKGIYKAMSEFDIFINYIEAYMTMKIRN

SEQ ID NO: 1108 - protein, 641 aa, synthetic construct
  REGION 1..641: note = Synthetic
MDMRVPAQLLGLLLLWLRGARCEVQVLESGGGLVQPGESLRLSCTASGFTFNAYAMSWVRQAPGKGLEWVSTISGSGSTTYYADSVKGRFTISRDNSKNTLDLQMNSLRAADTAVYYCAKVAGSNFFFDHWGQGTLVTVSSASTKGPSVFPLAPSSKSTSGGTAALGCLVKDYFPEPVTVSWNSGALTSGVHTFPAVLQSSGLYSLSSVVTVPSSSLGTQTYICNVNHKPSNTKVDKKVEPKSCDKTHTCPPCPAPELLGGPSVFLFPPKPKDTLMISRTPEVTCVVVDVSHEDPEVKFNWYVDGVEVHNAKTKPCEEQYGSTYRCVSVLTVLHQDWLNGKEYKCKVSNKALPAPIEKTISKAKGQPREPQVYTLPPSRKEMTKNQVSLTCLVKGFYPSDIAVEWESNGQPENNYKTTPPVLKSDGSFFLYSKLTVDKSRWQQGNVFSCSVMHEALHNHYTQKSLSLSPGGGGGSSPGQGTQSENSCTHFPGNLPNMLRDLRDAFSRVKTFFEMKDQLDNLLLKESLLEDFKGYLGCQALSEMIQFYLEEVMPQAENQDPDIKAHVNSLGENLKTLRLRLRRCHRFLPCENGGGSGGKSKAVEQVKNAFNKLQEKGIYKAMSEFDIFINYIEAYMTMKIRN

SEQ ID NO: 1109 - protein, 237 aa, synthetic construct; identical to SEQ ID NO: 864
  REGION 1..237: note = Synthetic

SEQ ID NO: 1110 - protein, 419 aa, synthetic construct
  REGION 1..419: note = Synthetic
MDMRVPAQLLGLLLLWLRGARCDKTHTCPPCPAPELLGGPSVFLFPPKPKDTLMISRTPEVTCVVVDVSHEDPEVKFNWYVDGVEVHNAKTKPCEEQYGSTYRCVSVLTVLHQDWLNGKEYKCKVSNKALPAPIEKTISKAKGQPREPQVYTLPPSREEMTKNQVSLTCLVKGFYPSDIAVEWESNGQPENNYDTTPPVLDSDGSFFLYSDLTVDKSRWQQGNVFSCSVMHEALHNHYTQDSLSLSPGGGGGSSPGQGTQSENSCTHFPGNLPNMLRDLRDAFSRVKTFFEMKDQLDNLLLKESLLEDFKGYLGCQALSEMIQFYLEEVMPQAENQDPDIKAHVNSLGENLKTLRLRLRRCHRFLPCENGGGSGGKSKAVEQVKNAFNKLQEKGIYKAMSEFDIFINYIEAYMTMKIRN

SEQ ID NO: 1111 - protein, 641 aa, synthetic construct
  REGION 1..641: note = Synthetic
MDMRVPAQLLGLLLLWLRGARCEVQLLESGGGLVQPGGSLRLSCAASGFTFSTYAMNWVRQAPGKGLEWVSTVSGSGRPTYYADSVKGRFTISRDNSKNTLYLQMNSLRAEDTAVYYCAKAYYSNYLFDYWGQGTLVTVSSASTKGPSVFPLAPSSKSTSGGTAALGCLVKDYFPEPVTVSWNSGALTSGVHTFPAVLQSSGLYSLSSVVTVPSSSLGTQTYICNVNHKPSNTKVDKKVEPKSCDKTHTCPPCPAPELLGGPSVFLFPPKPKDTLMISRTPEVTCVVVDVSHEDPEVKFNWYVDGVEVHNAKTKPCEEQYGSTYRCVSVLTVLHQDWLNGKEYKCKVSNKALPAPIEKTISKAKGQPREPQVYTLPPSRKEMTKNQVSLTCLVKGFYPSDIAVEWESNGQPENNYKTTPPVLKSDGSFFLYSKLTVDKSRWQQGNVFSCSVMHEALHNHYTQKSLSLSPGGGGGSSPGQGTQSENSCTHFPGNLPNMLRDLLDAFSRVKTFFQMKDQLDNLLLKESLLEDFKGYLGCQALSEMIQFYLEEVMPQAENQDPDIKAHVNSLGENLKTLRLRLRRCHRFLPCENGGGSGGKSKAVEQVKNAFNKLQEKGIYKAMSEFDIFINYIEAYMTMKIRN

SEQ ID NO: 1112 - protein, 237 aa, synthetic construct; identical to SEQ ID NO: 880
  REGION 1..237: note = Synthetic

SEQ ID NO: 1113 - protein, 419 aa, synthetic construct; identical to SEQ ID NO: 1089
  REGION 1..419: note = Synthetic

SEQ ID NO: 1114 - protein, 641 aa, synthetic construct
  REGION 1..641: note = Synthetic
MDMRVPAQLLGLLLLWLRGARCEVQLLESGGGLVQPGGSLRLSCAASGFTFSTYAMNWVRQAPGKGLEWVSTVSGSGRPTYYADSVKGRFTISRDNSKNTLYLQMNSLRAEDTAVYYCAKAYYSNYLFDYWGQGTLVTVSSASTKGPSVFPLAPSSKSTSGGTAALGCLVKDYFPEPVTVSWNSGALTSGVHTFPAVLQSSGLYSLSSVVTVPSSSLGTQTYICNVNHKPSNTKVDKKVEPKSCDKTHTCPPCPAPELLGGPSVFLFPPKPKDTLMISRTPEVTCVVVDVSHEDPEVKFNWYVDGVEVHNAKTKPCEEQYGSTYRCVSVLTVLHQDWLNGKEYKCKVSNKALPAPIEKTISKAKGQPREPQVYTLPPSRKEMTKNQVSLTCLVKGFYPSDIAVEWESNGQPENNYKTTPPVLKSDGSFFLYSKLTVDKSRWQQGNVFSCSVMHEALHNHYTQKSLSLSPGGGGGSSPGQGTQSENSCTHFPGNLPNMLRDLRDAFSRVKTFFQMKDQLDNLLLKESLLEDFKGYLGCQALSEMIQFYLEEVMPQAENQDPDIKAHVNSLGENLKTLRLRLRRCHRFLPCENGGGSGGKSKAVEQVKNAFNKLQEKGIYLAMSEFDIFINYIEAYMTMKIRN

SEQ ID NO: 1115 - protein, 237 aa, synthetic construct; identical to SEQ ID NO: 880
  REGION 1..237: note = Synthetic

SEQ ID NO: 1116 - protein, 419 aa, synthetic construct; identical to SEQ ID NO: 1092
  REGION 1..419: note = Synthetic

SEQ ID NO: 1117 - protein, 641 aa, synthetic construct
  REGION 1..641: note = Synthetic
MDMRVPAQLLGLLLLWLRGARCEVQLLESGGGLVQPGGSLRLSCAASGFTFSTYAMNWVRQAPGKGLEWVSTVSGSGRPTYYADSVKGRFTISRDNSKNTLYLQMNSLRAEDTAVYYCAKAYYSNYLFDYWGQGTLVTVSSASTKGPSVFPLAPSSKSTSGGTAALGCLVKDYFPEPVTVSWNSGALTSGVHTFPAVLQSSGLYSLSSVVTVPSSSLGTQTYICNVNHKPSNTKVDKKVEPKSCDKTHTCPPCPAPELLGGPSVFLFPPKPKDTLMISRTPEVTCVVVDVSHEDPEVKFNWYVDGVEVHNAKTKPCEEQYGSTYRCVSVLTVLHQDWLNGKEYKCKVSNKALPAPIEKTISKAKGQPREPQVYTLPPSRKEMTKNQVSLTCLVKGFYPSDIAVEWESNGQPENNYKTTPPVLKSDGSFFLYSKLTVDKSRWQQGNVFSCSVMHEALHNHYTQKSLSLSPGGGGGSSPGQGTQSENSCTHFPGNLPNMLRDLRDAFSRVKTFFQMKDQLDNLLLKESLLEDFKGYLGCQALSEMIQFYLEEVMPQAENQDPDIKAHVNSLGENLKTLRLRLRRCHRFLPCENGGGSGGKSKAVEQVKNAFNKLQEKGIYDAMSEFDIFINYIEAYMTMKIRN

SEQ ID NO: 1118 - protein, 237 aa, synthetic construct; identical to SEQ ID NO: 880
  REGION 1..237: note = Synthetic

SEQ ID NO: 1119 - protein, 419 aa, synthetic construct; identical to SEQ ID NO: 1095
  REGION 1..419: note = Synthetic

SEQ ID NO: 1120 - protein, 641 aa, synthetic construct
  REGION 1..641: note = Synthetic
MDMRVPAQLLGLLLLWLRGARCEVQLLESGGGLVQPGGSLRLSCAASGFTFSTYAMNWVRQAPGKGLEWVSTVSGSGRPTYYADSVKGRFTISRDNSKNTLYLQMNSLRAEDTAVYYCAKAYYSNYLFDYWGQGTLVTVSSASTKGPSVFPLAPSSKSTSGGTAALGCLVKDYFPEPVTVSWNSGALTSGVHTFPAVLQSSGLYSLSSVVTVPSSSLGTQTYICNVNHKPSNTKVDKKVEPKSCDKTHTCPPCPAPELLGGPSVFLFPPKPKDTLMISRTPEVTCVVVDVSHEDPEVKFNWYVDGVEVHNAKTKPCEEQYGSTYRCVSVLTVLHQDWLNGKEYKCKVSNKALPAPIEKTISKAKGQPREPQVYTLPPSRKEMTKNQVSLTCLVKGFYPSDIAVEWESNGQPENNYKTTPPVLKSDGSFFLYSKLTVDKSRWQQGNVFSCSVMHEALHNHYTQKSLSLSPGGGGGSSPGQGTQSENSCTHFPGNLPNMLRDLRDAFSRVKTFFQMKGQLDNLLLKESLLEDFKGYLGCQALSEMIQFYLEEVMPQAENQDPDIKAHVNSLGENLKTLRLRLRRCHRFLPCENGGGSGGKSKAVEQVKNAFNKLQEKGIYKAMSEFDIFINYIEAYMTMKIRN

SEQ ID NO: 1121 - protein, 237 aa, synthetic construct; identical to SEQ ID NO: 880
  REGION 1..237: note = Synthetic

SEQ ID NO: 1122 - protein, 419 aa, synthetic construct; identical to SEQ ID NO: 1098
  REGION 1..419: note = Synthetic

SEQ ID NO: 1123 - protein, 641 aa, synthetic construct
  REGION 1..641: note = Synthetic
MDMRVPAQLLGLLLLWLRGARCEVQLLESGGGLVQPGGSLRLSCAASGFTFSTYAMNWVRQAPGKGLEWVSTVSGSGRPTYYADSVKGRFTISRDNSKNTLYLQMNSLRAEDTAVYYCAKAYYSNYLFDYWGQGTLVTVSSASTKGPSVFPLAPSSKSTSGGTAALGCLVKDYFPEPVTVSWNSGALTSGVHTFPAVLQSSGLYSLSSVVTVPSSSLGTQTYICNVNHKPSNTKVDKKVEPKSCDKTHTCPPCPAPELLGGPSVFLFPPKPKDTLMISRTPEVTCVVVDVSHEDPEVKFNWYVDGVEVHNAKTKPCEEQYGSTYRCVSVLTVLHQDWLNGKEYKCKVSNKALPAPIEKTISKAKGQPREPQVYTLPPSRKEMTKNQVSLTCLVKGFYPSDIAVEWESNGQPENNYKTTPPVLKSDGSFFLYSKLTVDKSRWQQGNVFSCSVMHEALHNHYTQKSLSLSPGGGGGSSPGQGTQSENSCTHFPGNLPNMLRDLRDAFSRVKTFFRMKDQLDNLLLKESLLEDFKGYLGCQALSEMIQFYLEEVMPQAENQDPDIKAHVNSLGENLKTLRLRLRRCHRFLPCENGGGSGGKSKAVEQVKNAFNKLQEKGIYKAMSEFDIFINYIEAYMTMKIRN

SEQ ID NO: 1124 - protein, 237 aa, synthetic construct; identical to SEQ ID NO: 880
  REGION 1..237: note = Synthetic

SEQ ID NO: 1125 - protein, 419 aa, synthetic construct; identical to SEQ ID NO: 1101
  REGION 1..419: note = Synthetic

SEQ ID NO: 1126 - protein, 641 aa, synthetic construct
  REGION 1..641: note = Synthetic
MDMRVPAQLLGLLLLWLRGARCEVQLLESGGGLVQPGGSLRLSCAASGFTFSTYAMNWVRQAPGKGLEWVSTVSGSGRPTYYADSVKGRFTISRDNSKNTLYLQMNSLRAEDTAVYYCAKAYYSNYLFDYWGQGTLVTVSSASTKGPSVFPLAPSSKSTSGGTAALGCLVKDYFPEPVTVSWNSGALTSGVHTFPAVLQSSGLYSLSSVVTVPSSSLGTQTYICNVNHKPSNTKVDKKVEPKSCDKTHTCPPCPAPELLGGPSVFLFPPKPKDTLMISRTPEVTCVVVDVSHEDPEVKFNWYVDGVEVHNAKTKPCEEQYGSTYRCVSVLTVLHQDWLNGKEYKCKVSNKALPAPIEKTISKAKGQPREPQVYTLPPSRKEMTKNQVSLTCLVKGFYPSDIAVEWESNGQPENNYKTTPPVLKSDGSFFLYSKLTVDKSRWQQGNVFSCSVMHEALHNHYTQKSLSLSPGGGGGSSPGQGTQSENSCTHFPGNLPNMLRDLRDAFSRVKTFFQMKDQLDNKLLKESLLEDFKGYLGCQALSEMIQFYLEEVMPQAENQDPDIKAHVNSLGENLKTLRLRLRRCHRFLPCENGGGSGGKSKAVEQVKNAFNKLQEKGIYKAMSEFDIFINYIEAYMTMKIRN

SEQ ID NO: 1127 - protein, 237 aa, synthetic construct; identical to SEQ ID NO: 880
  REGION 1..237: note = Synthetic

SEQ ID NO: 1128 - protein, 419 aa, synthetic construct; identical to SEQ ID NO: 1104
  REGION 1..419: note = Synthetic

SEQ ID NO: 1129 - protein, 641 aa, synthetic construct
  REGION 1..641: note = Synthetic
MDMRVPAQLLGLLLLWLRGARCEVQLLESGGGLVQPGGSLRLSCAASGFTFSTYAMNWVRQAPGKGLEWVSTVSGSGRPTYYADSVKGRFTISRDNSKNTLYLQMNSLRAEDTAVYYCAKAYYSNYLFDYWGQGTLVTVSSASTKGPSVFPLAPSSKSTSGGTAALGCLVKDYFPEPVTVSWNSGALTSGVHTFPAVLQSSGLYSLSSVVTVPSSSLGTQTYICNVNHKPSNTKVDKKVEPKSCDKTHTCPPCPAPELLGGPSVFLFPPKPKDTLMISRTPEVTCVVVDVSHEDPEVKFNWYVDGVEVHNAKTKPCEEQYGSTYRCVSVLTVLHQDWLNGKEYKCKVSNKALPAPIEKTISKAKGQPREPQVYTLPPSRKEMTKNQVSLTCLVKGFYPSDIAVEWESNGQPENNYKTTPPVLKSDGSFFLYSKLTVDKSRWQQGNVFSCSVMHEALHNHYTQKSLSLSPGGGGGSSPGQGTQSENSCTHFPGNLPNMLRDLRDAFSRVDTFFQMKDQLDNLLLKESLLEDFKGYLGCQALSEMIQFYLEEVMPQAENQDPDIKAHVNSLGENLKTLRLRLRRCHRFLPCENGGGSGGKSKAVEQVKNAFNKLQEKGIYKAMSEFDIFINYIEAYMTMKIRN

SEQ ID NO: 1130 - protein, 237 aa, synthetic construct; identical to SEQ ID NO: 880
  REGION 1..237: note = Synthetic

SEQ ID NO: 1131 - protein, 419 aa, synthetic construct; identical to SEQ ID NO: 1107
  REGION 1..419: note = Synthetic

SEQ ID NO: 1132 - protein, 641 aa, synthetic construct
  REGION 1..641: note = Synthetic
MDMRVPAQLLGLLLLWLRGARCEVQLLESGGGLVQPGGSLRLSCAASGFTFSTYAMNWVRQAPGKGLEWVSTVSGSGRPTYYADSVKGRFTISRDNSKNTLYLQMNSLRAEDTAVYYCAKAYYSNYLFDYWGQGTLVTVSSASTKGPSVFPLAPSSKSTSGGTAALGCLVKDYFPEPVTVSWNSGALTSGVHTFPAVLQSSGLYSLSSVVTVPSSSLGTQTYICNVNHKPSNTKVDKKVEPKSCDKTHTCPPCPAPELLGGPSVFLFPPKPKDTLMISRTPEVTCVVVDVSHEDPEVKFNWYVDGVEVHNAKTKPCEEQYGSTYRCVSVLTVLHQDWLNGKEYKCKVSNKALPAPIEKTISKAKGQPREPQVYTLPPSRKEMTKNQVSLTCLVKGFYPSDIAVEWESNGQPENNYKTTPPVLKSDGSFFLYSKLTVDKSRWQQGNVFSCSVMHEALHNHYTQKSLSLSPGGGGGSSPGQGTQSENSCTHFPGNLPNMLRDLRDAFSRVKTFFEMKDQLDNLLLKESLLEDFKGYLGCQALSEMIQFYLEEVMPQAENQDPDIKAHVNSLGENLKTLRLRLRRCHRFLPCENGGGSGGKSKAVEQVKNAFNKLQEKGIYKAMSEFDIFINYIEAYMTMKIRN

SEQ ID NO: 1133 - protein, 237 aa, synthetic construct; identical to SEQ ID NO: 880
  REGION 1..237: note = Synthetic

SEQ ID NO: 1134 - protein, 419 aa, synthetic construct; identical to SEQ ID NO: 1110
  REGION 1..419: note = Synthetic

SEQ ID NO: 1135 - protein, 641 aa, synthetic construct
  REGION 1..641: note = Synthetic
MDMRVPAQLLGLLLLWLRGARCEVQLLESGGGMVQPGGSLRLSCAVSGFTFSRYAMSWVRQAPGKGLEWVSEMRGSSGSTYYADSVKGRFTISRDNSKNTLYLQMNSLRVEDTAIYYCAKEFSSNSLFDYWGQGTLVTVSSASTKGPSVFPLAPSSKSTSGGTAALGCLVKDYFPEPVTVSWNSGALTSGVHTFPAVLQSSGLYSLSSVVTVPSSSLGTQTYICNVNHKPSNTKVDKKVEPKSCDKTHTCPPCPAPELLGGPSVFLFPPKPKDTLMISRTPEVTCVVVDVSHEDPEVKFNWYVDGVEVHNAKTKPCEEQYGSTYRCVSVLTVLHQDWLNGKEYKCKVSNKALPAPIEKTISKAKGQPREPQVYTLPPSRKEMTKNQVSLTCLVKGFYPSDIAVEWESNGQPENNYKTTPPVLKSDGSFFLYSKLTVDKSRWQQGNVFSCSVMHEALHNHYTQKSLSLSPGGGGGSSPGQGTQSENSCTHFPGNLPNMLRDLLDAFSRVKTFFQMKDQLDNLLLKESLLEDFKGYLGCQALSEMIQFYLEEVMPQAENQDPDIKAHVNSLGENLKTLRLRLRRCHRFLPCENGGGSGGKSKAVEQVKNAFNKLQEKGIYKAMSEFDIFINYIEAYMTMKIRN

SEQ ID NO: 1136 - protein, 237 aa, synthetic construct; identical to SEQ ID NO: 205
  REGION 1..237: note = Synthetic

SEQ ID NO: 1137 - protein, 419 aa, synthetic construct; identical to SEQ ID NO: 1089
  REGION 1..419: note = Synthetic

SEQ ID NO: 1138 - protein, 641 aa, synthetic construct
  REGION 1..641: note = Synthetic
MDMRVPAQLLGLLLLWLRGARCEVQLLESGGGMVQPGGSLRLSCAVSGFTFSRYAMSWVRQAPGKGLEWVSEMRGSSGSTYYADSVKGRFTISRDNSKNTLYLQMNSLRVEDTAIYYCAKEFSSNSLFDYWGQGTLVTVSSASTKGPSVFPLAPSSKSTSGGTAALGCLVKDYFPEPVTVSWNSGALTSGVHTFPAVLQSSGLYSLSSVVTVPSSSLGTQTYICNVNHKPSNTKVDKKVEPKSCDKTHTCPPCPAPELLGGPSVFLFPPKPKDTLMISRTPEVTCVVVDVSHEDPEVKFNWYVDGVEVHNAKTKPCEEQYGSTYRCVSVLTVLHQDWLNGKEYKCKVSNKALPAPIEKTISKAKGQPREPQVYTLPPSRKEMTKNQVSLTCLVKGFYPSDIAVEWESNGQPENNYKTTPPVLKSDGSFFLYSKLTVDKSRWQQGNVFSCSVMHEALHNHYTQKSLSLSPGGGGGSSPGQGTQSENSCTHFPGNLPNMLRDLRDAFSRVKTFFQMKDQLDNLLLKESLLEDFKGYLGCQALSEMIQFYLEEVMPQAENQDPDIKAHVNSLGENLKTLRLRLRRCHRFLPCENGGGSGGKSKAVEQVKNAFNKLQEKGIYLAMSEFDIFINYIEAYMTMKIRN

SEQ ID NO: 1139 - protein, 237 aa, synthetic construct; identical to SEQ ID NO: 205
  REGION 1..237: note = Synthetic

SEQ ID NO: 1140 - protein, 419 aa, synthetic construct; identical to SEQ ID NO: 1092
  REGION 1..419: note = Synthetic

SEQ ID NO: 1141 - protein, 641 aa, synthetic construct
  REGION 1..641: note = Synthetic
MDMRVPAQLLGLLLLWLRGARCEVQLLESGGGMVQPGGSLRLSCAVSGFTFSRYAMSWVRQAPGKGLEWVSEMRGSSGSTYYADSVKGRFTISRDNSKNTLYLQMNSLRVEDTAIYYCAKEFSSNSLFDYWGQGTLVTVSSASTKGPSVFPLAPSSKSTSGGTAALGCLVKDYFPEPVTVSWNSGALTSGVHTFPAVLQSSGLYSLSSVVTVPSSSLGTQTYICNVNHKPSNTKVDKKVEPKSCDKTHTCPPCPAPELLGGPSVFLFPPKPKDTLMISRTPEVTCVVVDVSHEDPEVKFNWYVDGVEVHNAKTKPCEEQYGSTYRCVSVLTVLHQDWLNGKEYKCKVSNKALPAPIEKTISKAKGQPREPQVYTLPPSRKEMTKNQVSLTCLVKGFYPSDIAVEWESNGQPENNYKTTPPVLKSDGSFFLYSKLTVDKSRWQQGNVFSCSVMHEALHNHYTQKSLSLSPGGGGGSSPGQGTQSENSCTHFPGNLPNMLRDLRDAFSRVKTFFQMKDQLDNLLLKESLLEDFKGYLGCQALSEMIQFYLEEVMPQAENQDPDIKAHVNSLGENLKTLRLRLRRCHRFLPCENGGGSGGKSKAVEQVKNAFNKLQEKGIYDAMSEFDIFINYIEAYMTMKIRN

SEQ ID NO: 1142 - protein, 237 aa, synthetic construct; identical to SEQ ID NO: 205
  REGION 1..237: note = Synthetic

SEQ ID NO: 1143 - protein, 419 aa, synthetic construct; identical to SEQ ID NO: 1095
  REGION 1..419: note = Synthetic

SEQ ID NO: 1144 - protein, 641 aa, synthetic construct
  REGION 1..641: note = Synthetic
MDMRVPAQLLGLLLLWLRGARCEVQLLESGGGMVQPGGSLRLSCAVSGFTFSRYAMSWVRQAPGKGLEWVSEMRGSSGSTYYADSVKGRFTISRDNSKNTLYLQMNSLRVEDTAIYYCAKEFSSNSLFDYWGQGTLVTVSSASTKGPSVFPLAPSSKSTSGGTAALGCLVKDYFPEPVTVSWNSGALTSGVHTFPAVLQSSGLYSLSSVVTVPSSSLGTQTYICNVNHKPSNTKVDKKVEPKSCDKTHTCPPCPAPELLGGPSVFLFPPKPKDTLMISRTPEVTCVVVDVSHEDPEVKFNWYVDGVEVHNAKTKPCEEQYGSTYRCVSVLTVLHQDWLNGKEYKCKVSNKALPAPIEKTISKAKGQPREPQVYTLPPSRKEMTKNQVSLTCLVKGFYPSDIAVEWESNGQPENNYKTTPPVLKSDGSFFLYSKLTVDKSRWQQGNVFSCSVMHEALHNHYTQKSLSLSPGGGGGSSPGQGTQSENSCTHFPGNLPNMLRDLRDAFSRVKTFFQMKGQLDNLLLKESLLEDFKGYLGCQALSEMIQFYLEEVMPQAENQDPDIKAHVNSLGENLKTLRLRLRRCHRFLPCENGGGSGGKSKAVEQVKNAFNKLQEKGIYKAMSEFDIFINYIEAYMTMKIRN

SEQ ID NO: 1145 - protein, 237 aa, synthetic construct; identical to SEQ ID NO: 205
  REGION 1..237: note = Synthetic

SEQ ID NO: 1146 - protein, 419 aa, synthetic construct; identical to SEQ ID NO: 1098
  REGION 1..419: note = Synthetic

SEQ ID NO: 1147 - protein, 641 aa, synthetic construct
  REGION 1..641: note = Synthetic
MDMRVPAQLLGLLLLWLRGARCEVQLLESGGGMVQPGGSLRLSCAVSGFTFSRYAMSWVRQAPGKGLEWVSEMRGSSGSTYYADSVKGRFTISRDNSKNTLYLQMNSLRVEDTAIYYCAKEFSSNSLFDYWGQGTLVTVSSASTKGPSVFPLAPSSKSTSGGTAALGCLVKDYFPEPVTVSWNSGALTSGVHTFPAVLQSSGLYSLSSVVTVPSSSLGTQTYICNVNHKPSNTKVDKKVEPKSCDKTHTCPPCPAPELLGGPSVFLFPPKPKDTLMISRTPEVTCVVVDVSHEDPEVKFNWYVDGVEVHNAKTKPCEEQYGSTYRCVSVLTVLHQDWLNGKEYKCKVSNKALPAPIEKTISKAKGQPREPQVYTLPPSRKEMTKNQVSLTCLVKGFYPSDIAVEWESNGQPENNYKTTPPVLKSDGSFFLYSKLTVDKSRWQQGNVFSCSVMHEALHNHYTQKSLSLSPGGGGGSSPGQGTQSENSCTHFPGNLPNMLRDLRDAFSRVKTFFRMKDQLDNLLLKESLLEDFKGYLGCQALSEMIQFYLEEVMPQAENQDPDIKAHVNSLGENLKTLRLRLRRCHRFLPCENGGGSGGKSKAVEQVKNAFNKLQEKGIYKAMSEFDIFINYIEAYMTMKIRN

SEQ ID NO: 1148 - protein, 237 aa, synthetic construct; identical to SEQ ID NO: 205
  REGION 1..237: note = Synthetic

SEQ ID NO: 1149 - protein, 419 aa, synthetic construct; identical to SEQ ID NO: 1101
  REGION 1..419: note = Synthetic

SEQ ID NO: 1150 - protein, 641 aa, synthetic construct
  REGION 1..641: note = Synthetic
MDMRVPAQLLGLLLLWLRGARCEVQLLESGGGMVQPGGSLRLSCAVSGFTFSRYAMSWVRQAPGKGLEWVSEMRGSSGSTYYADSVKGRFTISRDNSKNTLYLQMNSLRVEDTAIYYCAKEFSSNSLFDYWGQGTLVTVSSASTKGPSVFPLAPSSKSTSGGTAALGCLVKDYFPEPVTVSWNSGALTSGVHTFPAVLQSSGLYSLSSVVTVPSSSLGTQTYICNVNHKPSNTKVDKKVEPKSCDKTHTCPPCPAPELLGGPSVFLFPPKPKDTLMISRTPEVTCVVVDVSHEDPEVKFNWYVDGVEVHNAKTKPCEEQYGSTYRCVSVLTVLHQDWLNGKEYKCKVSNKALPAPIEKTISKAKGQPREPQVYTLPPSRKEMTKNQVSLTCLVKGFYPSDIAVEWESNGQPENNYKTTPPVLKSDGSFFLYSKLTVDKSRWQQGNVFSCSVMHEALHNHYTQKSLSLSPGGGGGSSPGQGTQSENSCTHFPGNLPNMLRDLRDAFSRVKTFFQMKDQLDNKLLKESLLEDFKGYLGCQALSEMIQFYLEEVMPQAENQDPDIKAHVNSLGENLKTLRLRLRRCHRFLPCENGGGSGGKSKAVEQVKNAFNKLQEKGIYKAMSEFDIFINYIEAYMTMKIRN

SEQ ID NO: 1151 - protein, 237 aa, synthetic construct; identical to SEQ ID NO: 205
  REGION 1..237: note = Synthetic

SEQ ID NO: 1152 - protein, 419 aa, synthetic construct; identical to SEQ ID NO: 1104
  REGION 1..419: note = Synthetic

SEQ ID NO: 1153 - protein, 641 aa, synthetic construct
  REGION 1..641: note = Synthetic
MDMRVPAQLLGLLLLWLRGARCEVQLLESGGGMVQPGGSLRLSCAVSGFTFSRYAMSWVRQAPGKGLEWVSEMRGSSGSTYYADSVKGRFTISRDNSKNTLYLQMNSLRVEDTAIYYCAKEFSSNSLFDYWGQGTLVTVSSASTKGPSVFPLAPSSKSTSGGTAALGCLVKDYFPEPVTVSWNSGALTSGVHTFPAVLQSSGLYSLSSVVTVPSSSLGTQTYICNVNHKPSNTKVDKKVEPKSCDKTHTCPPCPAPELLGGPSVFLFPPKPKDTLMISRTPEVTCVVVDVSHEDPEVKFNWYVDGVEVHNAKTKPCEEQYGSTYRCVSVLTVLHQDWLNGKEYKCKVSNKALPAPIEKTISKAKGQPREPQVYTLPPSRKEMTKNQVSLTCLVKGFYPSDIAVEWESNGQPENNYKTTPPVLKSDGSFFLYSKLTVDKSRWQQGNVFSCSVMHEALHNHYTQKSLSLSPGGGGGSSPGQGTQSENSCTHFPGNLPNMLRDLRDAFSRVDTFFQMKDQLDNLLLKESLLEDFKGYLGCQALSEMIQFYLEEVMPQAENQDPDIKAHVNSLGENLKTLRLRLRRCHRFLPCENGGGSGGKSKAVEQVKNAFNKLQEKGIYKAMSEFDIFINYIEAYMTMKIRN

SEQ ID NO: 1154 - protein, 237 aa, synthetic construct; identical to SEQ ID NO: 205
  REGION 1..237: note = Synthetic

SEQ ID NO: 1155 - protein, 419 aa, synthetic construct; identical to SEQ ID NO: 1107
  REGION 1..419: note = Synthetic

SEQ ID NO: 1156 - protein, 641 aa, synthetic construct
  REGION 1..641: note = Synthetic
MDMRVPAQLLGLLLLWLRGARCEVQLLESGGGMVQPGGSLRLSCAVSGFTFSRYAMSWVRQAPGKGLEWVSEMRGSSGSTYYADSVKGRFTISRDNSKNTLYLQMNSLRVEDTAIYYCAKEFSSNSLFDYWGQGTLVTVSSASTKGPSVFPLAPSSKSTSGGTAALGCLVKDYFPEPVTVSWNSGALTSGVHTFPAVLQSSGLYSLSSVVTVPSSSLGTQTYICNVNHKPSNTKVDKKVEPKSCDKTHTCPPCPAPELLGGPSVFLFPPKPKDTLMISRTPEVTCVVVDVSHEDPEVKFNWYVDGVEVHNAKTKPCEEQYGSTYRCVSVLTVLHQDWLNGKEYKCKVSNKALPAPIEKTISKAKGQPREPQVYTLPPSRKEMTKNQVSLTCLVKGFYPSDIAVEWESNGQPENNYKTTPPVLKSDGSFFLYSKLTVDKSRWQQGNVFSCSVMHEALHNHYTQKSLSLSPGGGGGSSPGQGTQSENSCTHFPGNLPNMLRDLRDAFSRVKTFFEMKDQLDNLLLKESLLEDFKGYLGCQALSEMIQFYLEEVMPQAENQDPDIKAHVNSLGENLKTLRLRLRRCHRFLPCENGGGSGGKSKAVEQVKNAFNKLQEKGIYKAMSEFDIFINYIEAYMTMKIRN

SEQ ID NO: 1157 - protein, 237 aa, synthetic construct; identical to SEQ ID NO: 205
  REGION 1..237: note = Synthetic

SEQ ID NO: 1158 - protein, 419 aa, synthetic construct; identical to SEQ ID NO: 1110
  REGION 1..419: note = Synthetic

SEQ ID NO: 1159 - protein, 638 aa, synthetic construct
  REGION 1..638: note = Synthetic
MDMRVPAQLLGLLLLWLRGARCEVQLVESGGGLVQPGGSLRLSCAASGFTFSSNWMSWVRQAPGKGLDWMASMKQDGSEIYYVDSVKGRFTISRDNAKNSLHLQMNSLRAEDTAVYYCVRGGWRFESWGQGALVTVSSASTKGPSVFPLAPSSKSTSGGTAALGCLVKDYFPEPVTVSWNSGALTSGVHTFPAVLQSSGLYSLSSVVTVPSSSLGTQTYICNVNHKPSNTKVDKKVEPKSCDKTHTCPPCPAPELLGGPSVFLFPPKPKDTLMISRTPEVTCVVVDVSHEDPEVKFNWYVDGVEVHNAKTKPCEEQYGSTYRCVSVLTVLHQDWLNGKEYKCKVSNKALPAPIEKTISKAKGQPREPQVYTLPPSRKEMTKNQVSLTCLVKGFYPSDIAVEWESNGQPENNYKTTPPVLKSDGSFFLYSKLTVDKSRWQQGNVFSCSVMHEALHNHYTQKSLSLSPGGGGGSSPGQGTQSENSCTHFPGNLPNMLRDLLDAFSRVKTFFQMKDQLDNLLLKESLLEDFKGYLGCQALSEMIQFYLEEVMPQAENQDPDIKAHVNSLGENLKTLRLRLRRCHRFLPCENGGGSGGKSKAVEQVKNAFNKLQEKGIYKAMSEFDIFINYIEAYMTMKIRN

SEQ ID NO: 1160 - protein, 236 aa, synthetic construct; identical to SEQ ID NO: 912
  REGION 1..236: note = Synthetic

SEQ ID NO: 1161 - protein, 419 aa, synthetic construct; identical to SEQ ID NO: 1089
  REGION 1..419: note = Synthetic

SEQ ID NO: 1162 - protein, 638 aa, synthetic construct
  REGION 1..638: note = Synthetic
MDMRVPAQLLGLLLLWLRGARCEVQLVESGGGLVQPGGSLRLSCAASGFTFSSNWMSWVRQAPGKGLDWMASMKQDGSEIYYVDSVKGRFTISRDNAKNSLHLQMNSLRAEDTAVYYCVRGGWRFESWGQGALVTVSSASTKGPSVFPLAPSSKSTSGGTAALGCLVKDYFPEPVTVSWNSGALTSGVHTFPAVLQSSGLYSLSSVVTVPSSSLGTQTYICNVNHKPSNTKVDKKVEPKSCDKTHTCPPCPAPELLGGPSVFLFPPKPKDTLMISRTPEVTCVVVDVSHEDPEVKFNWYVDGVEVHNAKTKPCEEQYGSTYRCVSVLTVLHQDWLNGKEYKCKVSNKALPAPIEKTISKAKGQPREPQVYTLPPSRKEMTKNQVSLTCLVKGFYPSDIAVEWESNGQPENNYKTTPPVLKSDGSFFLYSKLTVDKSRWQQGNVFSCSVMHEALHNHYTQKSLSLSPGGGGGSSPGQGTQSENSCTHFPGNLPNMLRDLRDAFSRVKTFFQMKDQLDNLLLKESLLEDFKGYLGCQALSEMIQFYLEEVMPQAENQDPDIKAHVNSLGENLKTLRLRLRRCHRFLPCENGGGSGGKSKAVEQVKNAFNKLQEKGIYLAMSEFDIFINYIEAYMTMKIRN

SEQ ID NO: 1163 - protein, 236 aa, synthetic construct; identical to SEQ ID NO: 912
  REGION 1..236: note = Synthetic

SEQ ID NO: 1164 - protein, 419 aa, synthetic construct; identical to SEQ ID NO: 1092
  REGION 1..419: note = Synthetic

SEQ ID NO: 1165 - protein, 638 aa, synthetic construct
  REGION 1..638: note = Synthetic
MDMRVPAQLLGLLLLWLRGARCEVQLVESGGGLVQPGGSLRLSCAASGFTFSSNWMSWVRQAPGKGLDWMASMKQDGSEIYYVDSVKGRFTISRDNAKNSLHLQMNSLRAEDTAVYYCVRGGWRFESWGQGALVTVSSASTKGPSVFPLAPSSKSTSGGTAALGCLVKDYFPEPVTVSWNSGALTSGVHTFPAVLQSSGLYSLSSVVTVPSSSLGTQTYICNVNHKPSNTKVDKKVEPKSCDKTHTCPPCPAPELLGGPSVFLFPPKPKDTLMISRTPEVTCVVVDVSHEDPEVKFNWYVDGVEVHNAKTKPCEEQYGSTYRCVSVLTVLHQDWLNGKEYKCKVSNKALPAPIEKTISKAKGQPREPQVYTLPPSRKEMTKNQVSLTCLVKGFYPSDIAVEWESNGQPENNYKTTPPVLKSDGSFFLYSKLTVDKSRWQQGNVFSCSVMHEALHNHYTQKSLSLSPGGGGGSSPGQGTQSENSCTHFPGNLPNMLRDLRDAFSRVKTFFQMKDQLDNLLLKESLLEDFKGYLGCQALSEMIQFYLEEVMPQAENQDPDIKAHVNSLGENLKTLRLRLRRCHRFLPCENGGGSGGKSKAVEQVKNAFNKLQEKGIYDAMSEFDIFINYIEAYMTMKIRN

SEQ ID NO: 1166 - protein, 236 aa, synthetic construct; identical to SEQ ID NO: 912
  REGION 1..236: note = Synthetic

SEQ ID NO: 1167 - protein, 419 aa, synthetic construct; identical to SEQ ID NO: 1095
  REGION 1..419: note = Synthetic

SEQ ID NO: 1168 - protein, 638 aa, synthetic construct
  REGION 1..638: note = Synthetic
MDMRVPAQLLGLLLLWLRGARCEVQLVESGGGLVQPGGSLRLSCAASGFTFSSNWMSWVRQAPGKGLDWMASMKQDGSEIYYVDSVKGRFTISRDNAKNSLHLQMNSLRAEDTAVYYCVRGGWRFESWGQGALVTVSSASTKGPSVFPLAPSSKSTSGGTAALGCLVKDYFPEPVTVSWNSGALTSGVHTFPAVLQSSGLYSLSSVVTVPSSSLGTQTYICNVNHKPSNTKVDKKVEPKSCDKTHTCPPCPAPELLGGPSVFLFPPKPKDTLMISRTPEVTCVVVDVSHEDPEVKFNWYVDGVEVHNAKTKPCEEQYGSTYRCVSVLTVLHQDWLNGKEYKCKVSNKALPAPIEKTISKAKGQPREPQVYTLPPSRKEMTKNQVSLTCLVKGFYPSDIAVEWESNGQPENNYKTTPPVLKSDGSFFLYSKLTVDKSRWQQGNVFSCSVMHEALHNHYTQKSLSLSPGGGGGSSPGQGTQSENSCTHFPGNLPNMLRDLRDAFSRVKTFFQMKGQLDNLLLKESLLEDFKGYLGCQALSEMIQFYLEEVMPQAENQDPDIKAHVNSLGENLKTLRLRLRRCHRFLPCENGGGSGGKSKAVEQVKNAFNKLQEKGIYKAMSEFDIFINYIEAYMTMKIRN

SEQ ID NO: 1169 - protein, 236 aa, synthetic construct; identical to SEQ ID NO: 912
  REGION 1..236: note = Synthetic

SEQ ID NO: 1170 - protein, 419 aa, synthetic construct; identical to SEQ ID NO: 1098
  REGION 1..419: note = Synthetic

SEQ ID NO: 1171 - protein, 638 aa, synthetic construct
  REGION 1..638: note = Synthetic
MDMRVPAQLLGLLLLWLRGARCEVQLVESGGGLVQPGGSLRLSCAASGFTFSSNWMSWVRQAPGKGLDWMASMKQDGSEIYYVDSVKGRFTISRDNAKNSLHLQMNSLRAEDTAVYYCVRGGWRFESWGQGALVTVSSASTKGPSVFPLAPSSKSTSGGTAALGCLVKDYFPEPVTVSWNSGALTSGVHTFPAVLQSSGLYSLSSVVTVPSSSLGTQTYICNVNHKPSNTKVDKKVEPKSCDKTHTCPPCPAPELLGGPSVFLFPPKPKDTLMISRTPEVTCVVVDVSHEDPEVKFNWYVDGVEVHNAKTKPCEEQYGSTYRCVSVLTVLHQDWLNGKEYKCKVSNKALPAPIEKTISKAKGQPREPQVYTLPPSRKEMTKNQVSLTCLVKGFYPSDIAVEWESNGQPENNYKTTPPVLKSDGSFFLYSKLTVDKSRWQQGNVFSCSVMHEALHNHYTQKSLSLSPGGGGGSSPGQGTQSENSCTHFPGNLPNMLRDLRDAFSRVKTFFRMKDQLDNLLLKESLLEDFKGYLGCQALSEMIQFYLEEVMPQAENQDPDIKAHVNSLGENLKTLRLRLRRCHRFLPCENGGGSGGKSKAVEQVKNAFNKLQEKGIYKAMSEFDIFINYIEAYMTMKIRN

SEQ ID NO: 1172 - protein, 236 aa, synthetic construct; identical to SEQ ID NO: 912
  REGION 1..236: note = Synthetic

SEQ ID NO: 1173 - protein, 419 aa, synthetic construct; identical to SEQ ID NO: 1101
  REGION 1..419: note = Synthetic

SEQ ID NO: 1174 - protein, 638 aa, synthetic construct
  REGION 1..638: note = Synthetic
MDMRVPAQLLGLLLLWLRGARCEVQLVESGGGLVQPGGSLRLSCAASGFTFSSNWMSWVRQAPGKGLDWMASMKQDGSEIYYVDSVKGRFTISRDNAKNSLHLQMNSLRAEDTAVYYCVRGGWRFESWGQGALVTVSSASTKGPSVFPLAPSSKSTSGGTAALGCLVKDYFPEPVTVSWNSGALTSGVHTFPAVLQSSGLYSLSSVVTVPSSSLGTQTYICNVNHKPSNTKVDKKVEPKSCDKTHTCPPCPAPELLGGPSVFLFPPKPKDTLMISRTPEVTCVVVDVSHEDPEVKFNWYVDGVEVHNAKTKPCEEQYGSTYRCVSVLTVLHQDWLNGKEYKCKVSNKALPAPIEKTISKAKGQPREPQVYTLPPSRKEMTKNQVSLTCLVKGFYPSDIAVEWESNGQPENNYKTTPPVLKSDGSFFLYSKLTVDKSRWQQGNVFSCSVMHEALHNHYTQKSLSLSPGGGGGSSPGQGTQSENSCTHFPGNLPNMLRDLRDAFSRVKTFFQMKDQLDNKLLKESLLEDFKGYLGCQALSEMIQFYLEEVMPQAENQDPDIKAHVNSLGENLKTLRLRLRRCHRFLPCENGGGSGGKSKAVEQVKNAFNKLQEKGIYKAMSEFDIFINYIEAYMTMKIRN

SEQ ID NO: 1175 - protein, 236 aa, synthetic construct; identical to SEQ ID NO: 912
  REGION 1..236: note = Synthetic

SEQ ID NO: 1176 - protein, 419 aa, synthetic construct; identical to SEQ ID NO: 1104
  REGION 1..419: note = Synthetic

SEQ ID NO: 1177 - protein, 638 aa, synthetic construct
  REGION 1..638: note = Synthetic
MDMRVPAQLLGLLLLWLRGARCEVQLVESGGGLVQPGGSLRLSCAASGFTFSSNWMSWVRQAPGKGLDWMASMKQDGSEIYYVDSVKGRFTISRDNAKNSLHLQMNSLRAEDTAVYYCVRGGWRFESWGQGALVTVSSASTKGPSVFPLAPSSKSTSGGTAALGCLVKDYFPEPVTVSWNSGALTSGVHTFPAVLQSSGLYSLSSVVTVPSSSLGTQTYICNVNHKPSNTKVDKKVEPKSCDKTHTCPPCPAPELLGGPSVFLFPPKPKDTLMISRTPEVTCVVVDVSHEDPEVKFNWYVDGVEVHNAKTKPCEEQYGSTYRCVSVLTVLHQDWLNGKEYKCKVSNKALPAPIEKTISKAKGQPREPQVYTLPPSRKEMTKNQVSLTCLVKGFYPSDIAVEWESNGQPENNYKTTPPVLKSDGSFFLYSKLTVDKSRWQQGNVFSCSVMHEALHNHYTQKSLSLSPGGGGGSSPGQGTQSENSCTHFPGNLPNMLRDLRDAFSRVDTFFQMKDQLDNLLLKESLLEDFKGYLGCQALSEMIQFYLEEVMPQAENQDPDIKAHVNSLGENLKTLRLRLRRCHRFLPCENGGGSGGKSKAVEQVKNAFNKLQEKGIYKAMSEFDIFINYIEAYMTMKIRN

SEQ ID NO: 1178 - protein, 236 aa, synthetic construct; identical to SEQ ID NO: 912
  REGION 1..236: note = Synthetic

SEQ ID NO: 1179 - protein, 419 aa, synthetic construct; identical to SEQ ID NO: 1107
  REGION 1..419: note = Synthetic

SEQ ID NO: 1180 - protein, 638 aa, synthetic construct
  REGION 1..638: note = Synthetic
MDMRVPAQLLGLLLLWLRGARCEVQLVESGGGLVQPGGSLRLSCAASGFTFSSNWMSWVRQAPGKGLDWMASMKQDGSEIYYVDSVKGRFTISRDNAKNSLHLQMNSLRAEDTAVYYCVRGGWRFESWGQGALVTVSSASTKGPSVFPLAPSSKSTSGGTAALGCLVKDYFPEPVTVSWNSGALTSGVHTFPAVLQSSGLYSLSSVVTVPSSSLGTQTYICNVNHKPSNTKVDKKVEPKSCDKTHTCPPCPAPELLGGPSVFLFPPKPKDTLMISRTPEVTCVVVDVSHEDPEVKFNWYVDGVEVHNAKTKPCEEQYGSTYRCVSVLTVLHQDWLNGKEYKCKVSNKALPAPIEKTISKAKGQPREPQVYTLPPSRKEMTKNQVSLTCLVKGFYPSDIAVEWESNGQPENNYKTTPPVLKSDGSFFLYSKLTVDKSRWQQGNVFSCSVMHEALHNHYTQKSLSLSPGGGGGSSPGQGTQSENSCTHFPGNLPNMLRDLRDAFSRVKTFFEMKDQLDNLLLKESLLEDFKGYLGCQALSEMIQFYLEEVMPQAENQDPDIKAHVNSLGENLKTLRLRLRRCHRFLPCENGGGSGGKSKAVEQVKNAFNKLQEKGIYKAMSEFDIFINYIEAYMTMKIRN

SEQ ID NO: 1181 - protein, 236 aa, synthetic construct; identical to SEQ ID NO: 912
  REGION 1..236: note = Synthetic

SEQ ID NO: 1182 - protein, 419 aa, synthetic construct; identical to SEQ ID NO: 1110
  REGION 1..419: note = Synthetic

SEQ ID NO: 1183 - protein, 639 aa, synthetic construct
  REGION 1..639: note = Synthetic
MDMRVPAQLLGLLLLWLRGARCEVQLVESGGGLVQPGGSLRLSCAASGFTFSSYWMSWVRQAPGKGLEWVANIKQDGSEEYYVDSVKGRFTISRDNAKNSLFLQMNSLRAEDTAVYYCARDYGDSFDYWGQGTLVTVSSASTKGPSVFPLAPSSKSTSGGTAALGCLVKDYFPEPVTVSWNSGALTSGVHTFPAVLQSSGLYSLSSVVTVPSSSLGTQTYICNVNHKPSNTKVDKKVEPKSCDKTHTCPPCPAPELLGGPSVFLFPPKPKDTLMISRTPEVTCVVVDVSHEDPEVKFNWYVDGVEVHNAKTKPCEEQYGSTYRCVSVLTVLHQDWLNGKEYKCKVSNKALPAPIEKTISKAKGQPREPQVYTLPPSRKEMTKNQVSLTCLVKGFYPSDIAVEWESNGQPENNYKTTPPVLKSDGSFFLYSKLTVDKSRWQQGNVFSCSVMHEALHNHYTQKSLSLSPGGGGGSSPGQGTQSENSCTHFPGNLPNMLRDLLDAFSRVKTFFQMKDQLDNLLLKESLLEDFKGYLGCQALSEMIQFYLEEVMPQAENQDPDIKAHVNSLGENLKTLRLRLRRCHRFLPCENGGGSGGKSKAVEQVKNAFNKLQEKGIYKAMSEFDIFINYIEAYMTMKIRN

SEQ ID NO: 1184 - protein, 236 aa, synthetic construct; identical to SEQ ID NO: 165
  REGION 1..236: note = Synthetic

SEQ ID NO: 1185 - protein, 419 aa, synthetic construct; identical to SEQ ID NO: 1089
  REGION 1..419: note = Synthetic

SEQ ID NO: 1186 - protein, 639 aa, synthetic construct
  REGION 1..639: note = Synthetic
MDMRVPAQLLGLLLLWLRGARCEVQLVESGGGLVQPGGSLRLSCAASGFTFSSYWMSWVRQAPGKGLEWVANIKQDGSEEYYVDSVKGRFTISRDNAKNSLFLQMNSLRAEDTAVYYCARDYGDSFDYWGQGTLVTVSSASTKGPSVFPLAPSSKSTSGGTAALGCLVKDYFPEPVTVSWNSGALTSGVHTFPAVLQSSGLYSLSSVVTVPSSSLGTQTYICNVNHKPSNTKVDKKVEPKSCDKTHTCPPCPAPELLGGPSVFLFPPKPKDTLMISRTPEVTCVVVDVSHEDPEVKFNWYVDGVEVHNAKTKPCEEQYGSTYRCVSVLTVLHQDWLNGKEYKCKVSNKALPAPIEKTISKAKGQPREPQVYTLPPSRKEMTKNQVSLTCLVKGFYPSDIAVEWESNGQPENNYKTTPPVLKSDGSFFLYSKLTVDKSRWQQGNVFSCSVMHEALHNHYTQKSLSLSPGGGGGSSPGQGTQSENSCTHFPGNLPNMLRDLRDAFSRVKTFFQMKDQLDNLLLKESLLEDFKGYLGCQALSEMIQFYLEEVMPQAENQDPDIKAHVNSLGENLKTLRLRLRRCHRFLPCENGGGSGGKSKAVEQVKNAFNKLQEKGIYLAMSEFDIFINYIEAYMTMKIRN

SEQ ID NO: 1187 - protein, 236 aa, synthetic construct; identical to SEQ ID NO: 165
  REGION 1..236: note = Synthetic

SEQ ID NO: 1188 - protein, 419 aa, synthetic construct; identical to SEQ ID NO: 1092
  REGION 1..419: note = Synthetic

SEQ ID NO: 1189 - protein, 639 aa, synthetic construct
  REGION 1..639: note = Synthetic
MDMRVPAQLLGLLLLWLRGARCEVQLVESGGGLVQPGGSLRLSCAASGFTFSSYWMSWVRQAPGKGLEWVANIKQDGSEEYYVDSVKGRFTISRDNAKNSLFLQMNSLRAEDTAVYYCARDYGDSFDYWGQGTLVTVSSASTKGPSVFPLAPSSKSTSGGTAALGCLVKDYFPEPVTVSWNSGALTSGVHTFPAVLQSSGLYSLSSVVTVPSSSLGTQTYICNVNHKPSNTKVDKKVEPKSCDKTHTCPPCPAPELLGGPSVFLFPPKPKDTLMISRTPEVTCVVVDVSHEDPEVKFNWYVDGVEVHNAKTKPCEEQYGSTYRCVSVLTVLHQDWLNGKEYKCKVSNKALPAPIEKTISKAKGQPREPQVYTLPPSRKEMTKNQVSLTCLVKGFYPSDIAVEWESNGQPENNYKTTPPVLKSDGSFFLYSKLTVDKSRWQQGNVFSCSVMHEALHNHYTQKSLSLSPGGGGGSSPGQGTQSENSCTHFPGNLPNMLRDLRDAFSRVKTFFQMKDQLDNLLLKESLLEDFKGYLGCQALSEMIQFYLEEVMPQAENQDPDIKAHVNSLGENLKTLRLRLRRCHRFLPCENGGGSGGKSKAVEQVKNAFNKLQEKGIYDAMSEFDIFINYIEAYMTMKIRN

SEQ ID NO: 1190 - protein, 236 aa, synthetic construct; identical to SEQ ID NO: 165
  REGION 1..236: note = Synthetic

SEQ ID NO: 1191 - protein, 419 aa, synthetic construct; identical to SEQ ID NO: 1095
  REGION 1..419: note = Synthetic

SEQ ID NO: 1192 - protein, 639 aa, synthetic construct
  REGION 1..639: note = Synthetic
MDMRVPAQLLGLLLLWLRGARCEVQLVESGGGLVQPGGSLRLSCAASGFTFSSYWMSWVRQAPGKGLEWVANIKQDGSEEYYVDSVKGRFTISRDNAKNSLFLQMNSLRAEDTAVYYCARDYGDSFDYWGQGTLVTVSSASTKGPSVFPLAPSSKSTSGGTAALGCLVKDYFPEPVTVSWNSGALTSGVHTFPAVLQSSGLYSLSSVVTVPSSSLGTQTYICNVNHKPSNTKVDKKVEPKSCDKTHTCPPCPAPELLGGPSVFLFPPKPKDTLMISRTPEVTCVVVDVSHEDPEVKFNWYVDGVEVHNAKTKPCEEQYGSTYRCVSVLTVLHQDWLNGKEYKCKVSNKALPAPIEKTISKAKGQPREPQVYTLPPSRKEMTKNQVSLTCLVKGFYPSDIAVEWESNGQPENNYKTTPPVLKSDGSFFLYSKLTVDKSRWQQGNVFSCSVMHEALHNHYTQKSLSLSPGGGGGSSPGQGTQSENSCTHFPGNLPNMLRDLRDAFSRVKTFFQMKGQLDNLLLKESLLEDFKGYLGCQALSEMIQFYLEEVMPQAENQDPDIKAHVNSLGENLKTLRLRLRRCHRFLPCENGGGSGGKSKAVEQVKNAFNKLQEKGIYKAMSEFDIFINYIEAYMTMKIRN

SEQ ID NO: 1193 - protein, 236 aa, synthetic construct; identical to SEQ ID NO: 165
  REGION 1..236: note = Synthetic

SEQ ID NO: 1194 - protein, 419 aa, synthetic construct; identical to SEQ ID NO: 1098
  REGION 1..419: note = Synthetic

SEQ ID NO: 1195 - protein, 639 aa, synthetic construct
  REGION 1..639: note = Synthetic
MDMRVPAQLLGLLLLWLRGARCEVQLVESGGGLVQPGGSLRLSCAASGFTFSSYWMSWVRQAPGKGLEWVANIKQDGSEEYYVDSVKGRFTISRDNAKNSLFLQMNSLRAEDTAVYYCARDYGDSFDYWGQGTLVTVSSASTKGPSVFPLAPSSKSTSGGTAALGCLVKDYFPEPVTVSWNSGALTSGVHTFPAVLQSSGLYSLSSVVTVPSSSLGTQTYICNVNHKPSNTKVDKKVEPKSCDKTHTCPPCPAPELLGGPSVFLFPPKPKDTLMISRTPEVTCVVVDVSHEDPEVKFNWYVDGVEVHNAKTKPCEEQYGSTYRCVSVLTVLHQDWLNGKEYKCKVSNKALPAPIEKTISKAKGQPREPQVYTLPPSRKEMTKNQVSLTCLVKGFYPSDIAVEWESNGQPENNYKTTPPVLKSDGSFFLYSKLTVDKSRWQQGNVFSCSVMHEALHNHYTQKSLSLSPGGGGGSSPGQGTQSENSCTHFPGNLPNMLRDLRDAFSRVKTFFRMKDQLDNLLLKESLLEDFKGYLGCQALSEMIQFYLEEVMPQAENQDPDIKAHVNSLGENLKTLRLRLRRCHRFLPCENGGGSGGKSKAVEQVKNAFNKLQEKGIYKAMSEFDIFINYIEAYMTMKIRN

SEQ ID NO: 1196 - protein, 236 aa, synthetic construct; identical to SEQ ID NO: 165
  REGION 1..236: note = Synthetic

SEQ ID NO: 1197 - protein, 419 aa, synthetic construct; identical to SEQ ID NO: 1101
  REGION 1..419: note = Synthetic

SEQ ID NO: 1198 - protein, 639 aa, synthetic construct
  REGION 1..639: note = Synthetic
MDMRVPAQLLGLLLLWLRGARCEVQLVESGGGLVQPGGSLRLSCAASGFTFSSYWMSWVRQAPGKGLEWVANIKQDGSEEYYVDSVKGRFTISRDNAKNSLFLQMNSLRAEDTAVYYCARDYGDSFDYWGQGTLVTVSSASTKGPSVFPLAPSSKSTSGGTAALGCLVKDYFPEPVTVSWNSGALTSGVHTFPAVLQSSGLYSLSSVVTVPSSSLGTQTYICNVNHKPSNTKVDKKVEPKSCDKTHTCPPCPAPELLGGPSVFLFPPKPKDTLMISRTPEVTCVVVDVSHEDPEVKFNWYVDGVEVHNAKTKPCEEQYGSTYRCVSVLTVLHQDWLNGKEYKCKVSNKALPAPIEKTISKAKGQPREPQVYTLPPSRKEMTKNQVSLTCLVKGFYPSDIAVEWESNGQPENNYKTTPPVLKSDGSFFLYSKLTVDKSRWQQGNVFSCSVMHEALHNHYTQKSLSLSPGGGGGSSPGQGTQSENSCTHFPGNLPNMLRDLRDAFSRVKTFFQMKDQLDNKLLKESLLEDFKGYLGCQALSEMIQFYLEEVMPQAENQDPDIKAHVNSLGENLKTLRLRLRRCHRFLPCENGGGSGGKSKAVEQVKNAFNKLQEKGIYKAMSEFDIFINYIEAYMTMKIRN

SEQ ID NO: 1199 - protein, 236 aa, synthetic construct; identical to SEQ ID NO: 165
  REGION 1..236: note = Synthetic

SEQ ID NO: 1200 - protein, 419 aa, synthetic construct; identical to SEQ ID NO: 1104
  REGION 1..419: note = Synthetic

SEQ ID NO: 1201 - protein, 639 aa, synthetic construct
  REGION 1..639: note = Synthetic
MDMRVPAQLLGLLLLWLRGARCEVQLVESGGGLVQPGGSLRLSCAASGFTFSSYWMSWVRQAPGKGLEWVANIKQDGSEEYYVDSVKGRFTISRDNAKNSLFLQMNSLRAEDTAVYYCARDYGDSFDYWGQGTLVTVSSASTKGPSVFPLAPSSKSTSGGTAALGCLVKDYFPEPVTVSWNSGALTSGVHTFPAVLQSSGLYSLSSVVTVPSSSLGTQTYICNVNHKPSNTKVDKKVEPKSCDKTHTCPPCPAPELLGGPSVFLFPPKPKDTLMISRTPEVTCVVVDVSHEDPEVKFNWYVDGVEVHNAKTKPCEEQYGSTYRCVSVLTVLHQDWLNGKEYKCKVSNKALPAPIEKTISKAKGQPREPQVYTLPPSRKEMTKNQVSLTCLVKGFYPSDIAVEWESNGQPENNYKTTPPVLKSDGSFFLYSKLTVDKSRWQQGNVFSCSVMHEALHNHYTQKSLSLSPGGGGGSSPGQGTQSENSCTHFPGNLPNMLRDLRDAFSRVDTFFQMKDQLDNLLLKESLLEDFKGYLGCQALSEMIQFYLEEVMPQAENQDPDIKAHVNSLGENLKTLRLRLRRCHRFLPCENGGGSGGKSKAVEQVKNAFNKLQEKGIYKAMSEFDIFINYIEAYMTMKIRN

SEQ ID NO: 1202 - protein, 236 aa, synthetic construct; identical to SEQ ID NO: 165
  REGION 1..236: note = Synthetic

SEQ ID NO: 1203 - protein, 419 aa, synthetic construct; identical to SEQ ID NO: 1107
  REGION 1..419: note = Synthetic

SEQ ID NO: 1204 - protein, 639 aa, synthetic construct
  REGION 1..639: note = Synthetic
MDMRVPAQLLGLLLLWLRGARCEVQLVESGGGLVQPGGSLRLSCAASGFTFSSYWMSWVRQAPGKGLEWVANIKQDGSEEYYVDSVKGRFTISRDNAKNSLFLQMNSLRAEDTAVYYCARDYGDSFDYWGQGTLVTVSSASTKGPSVFPLAPSSKSTSGGTAALGCLVKDYFPEPVTVSWNSGALTSGVHTFPAVLQSSGLYSLSSVVTVPSSSLGTQTYICNVNHKPSNTKVDKKVEPKSCDKTHTCPPCPAPELLGGPSVFLFPPKPKDTLMISRTPEVTCVVVDVSHEDPEVKFNWYVDGVEVHNAKTKPCEEQYGSTYRCVSVLTVLHQDWLNGKEYKCKVSNKALPAPIEKTISKAKGQPREPQVYTLPPSRKEMTKNQVSLTCLVKGFYPSDIAVEWESNGQPENNYKTTPPVLKSDGSFFLYSKLTVDKSRWQQGNVFSCSVMHEALHNHYTQKSLSLSPGGGGGSSPGQGTQSENSCTHFPGNLPNMLRDLRDAFSRVKTFFEMKDQLDNLLLKESLLEDFKGYLGCQALSEMIQFYLEEVMPQAENQDPDIKAHVNSLGENLKTLRLRLRRCHRFLPCENGGGSGGKSKAVEQVKNAFNKLQEKGIYKAMSEFDIFINYIEAYMTMKIRN

SEQ ID NO: 1205 - protein, 236 aa, synthetic construct; identical to SEQ ID NO: 165
  REGION 1..236: note = Synthetic

SEQ ID NO: 1206 - protein, 419 aa, synthetic construct; identical to SEQ ID NO: 1110
  REGION 1..419: note = Synthetic

SEQ ID NO: 1207 - protein, 644 aa, synthetic construct
  REGION 1..644: note = Synthetic
MDMRVPAQLLGLLLLWLRGARCQVQLVQSGAEVKKPGASVKVSCKASGYTFTRYDINWVRQATGQGLEWMGWLNPNSGNTGQTQKFRGRVTMTRDTSINTAYMELSSLRSEDTAVYYCARGGYTSAWRWYFDLWGRGTLVTVSSASTKGPSVFPLAPSSKSTSGGTAALGCLVKDYFPEPVTVSWNSGALTSGVHTFPAVLQSSGLYSLSSVVTVPSSSLGTQTYICNVNHKPSNTKVDKKVEPKSCDKTHTCPPCPAPELLGGPSVFLFPPKPKDTLMISRTPEVTCVVVDVSHEDPEVKFNWYVDGVEVHNAKTKPCEEQYGSTYRCVSVLTVLHQDWLNGKEYKCKVSNKALPAPIEKTISKAKGQPREPQVYTLPPSRKEMTKNQVSLTCLVKGFYPSDIAVEWESNGQPENNYKTTPPVLKSDGSFFLYSKLTVDKSRWQQGNVFSCSVMHEALHNHYTQKSLSLSPGGGGGSSPGQGTQSENSCTHFPGNLPNMLRDLLDAFSRVKTFFQMKDQLDNLLLKESLLEDFKGYLGCQALSEMIQFYLEEVMPQAENQDPDIKAHVNSLGENLKTLRLRLRRCHRFLPCENGGGSGGKSKAVEQVKNAFNKLQEKGIYKAMSEFDIFINYIEAYMTMKIRN

SEQ ID NO: 1208 - protein, 236 aa, synthetic construct; identical to SEQ ID NO: 944
  REGION 1..236: note = Synthetic

SEQ ID NO: 1209 - protein, 419 aa, synthetic construct; identical to SEQ ID NO: 1089
  REGION 1..419: note = Synthetic

SEQ ID NO: 1210 - protein, 644 aa, synthetic construct
  REGION 1..644: note = Synthetic
MDMRVPAQLLGLLLLWLRGARCQVQLVQSGAEVKKPGASVKVSCKASGYTFTRYDINWVRQATGQGLEWMGWLNPNSGNTGQTQKFRGRVTMTRDTSINTAYMELSSLRSEDTAVYYCARGGYTSAWRWYFDLWGRGTLVTVSSASTKGPSVFPLAPSSKSTSGGTAALGCLVKDYFPEPVTVSWNSGALTSGVHTFPAVLQSSGLYSLSSVVTVPSSSLGTQTYICNVNHKPSNTKVDKKVEPKSCDKTHTCPPCPAPELLGGPSVFLFPPKPKDTLMISRTPEVTCVVVDVSHEDPEVKFNWYVDGVEVHNAKTKPCEEQYGSTYRCVSVLTVLHQDWLNGKEYKCKVSNKALPAPIEKTISKAKGQPREPQVYTLPPSRKEMTKNQVSLTCLVKGFYPSDIAVEWESNGQPENNYKTTPPVLKSDGSFFLYSKLTVDKSRWQQGNVFSCSVMHEALHNHYTQKSLSLSPGGGGGSSPGQGTQSENSCTHFPGNLPNMLRDLRDAFSRVKTFFQMKDQLDNLLLKESLLEDFKGYLGCQALSEMIQFYLEEVMPQAENQDPDIKAHVNSLGENLKTLRLRLRRCHRFLPCENGGGSGGKSKAVEQVKNAFNKLQEKGIYLAMSEFDIFINYIEAYMTMKIRN

SEQ ID NO: 1211 - protein, 236 aa, synthetic construct; identical to SEQ ID NO: 944
  REGION 1..236: note = Synthetic

SEQ ID NO: 1212 - protein, 419 aa, synthetic construct; identical to SEQ ID NO: 1092
  REGION 1..419: note = Synthetic

SEQ ID NO: 1213 - protein, 644 aa, synthetic construct
  REGION 1..644: note = Synthetic
MDMRVPAQLLGLLLLWLRGARCQVQLVQSGAEVKKPGASVKVSCKASGYTFTRYDINWVRQATGQGLEWMGWLNPNSGNTGQTQKFRGRVTMTRDTSINTAYMELSSLRSEDTAVYYCARGGYTSAWRWYFDLWGRGTLVTVSSASTKGPSVFPLAPSSKSTSGGTAALGCLVKDYFPEPVTVSWNSGALTSGVHTFPAVLQSSGLYSLSSVVTVPSSSLGTQTYICNVNHKPSNTKVDKKVEPKSCDKTHTCPPCPAPELLGGPSVFLFPPKPKDTLMISRTPEVTCVVVDVSHEDPEVKFNWYVDGVEVHNAKTKPCEEQYGSTYRCVSVLTVLHQDWLNGKEYKCKVSNKALPAPIEKTISKAKGQPREPQVYTLPPSRKEMTKNQVSLTCLVKGFYPSDIAVEWESNGQPENNYKTTPPVLKSDGSFFLYSKLTVDKSRWQQGNVFSCSVMHEALHNHYTQKSLSLSPGGGGGSSPGQGTQSENSCTHFPGNLPNMLRDLRDAFSRVKTFFQMKDQLDNLLLKESLLEDFKGYLGCQALSEMIQFYLEEVMPQAENQDPDIKAHVNSLGENLKTLRLRLRRCHRFLPCENGGGSGGKSKAVEQVKNAFNKLQEKGIYDAMSEFDIFINYIEAYMTMKIRN

SEQ ID NO: 1214 - protein, 236 aa, synthetic construct; identical to SEQ ID NO: 944
  REGION 1..236: note = Synthetic

SEQ ID NO: 1215 - protein, 419 aa, synthetic construct; identical to SEQ ID NO: 1095
  REGION 1..419: note = Synthetic

SEQ ID NO: 1216 - protein, 644 aa, synthetic construct
  REGION 1..644: note = Synthetic
MDMRVPAQLLGLLLLWLRGARCQVQLVQSGAEVKKPGASVKVSCKASGYTFTRYDINWVRQATGQGLEWMGWLNPNSGNTGQTQKFRGRVTMTRDTSINTAYMELSSLRSEDTAVYYCARGGYTSAWRWYFDLWGRGTLVTVSSASTKGPSVFPLAPSSKSTSGGTAALGCLVKDYFPEPVTVSWNSGALTSGVHTFPAVLQSSGLYSLSSVVTVPSSSLGTQTYICNVNHKPSNTKVDKKVEPKSCDKTHTCPPCPAPELLGGPSVFLFPPKPKDTLMISRTPEVTCVVVDVSHEDPEVKFNWYVDGVEVHNAKTKPCEEQYGSTYRCVSVLTVLHQDWLNGKEYKCKVSNKALPAPIEKTISKAKGQPREPQVYTLPPSRKEMTKNQVSLTCLVKGFYPSDIAVEWESNGQPENNYKTTPPVLKSDGSFFLYSKLTVDKSRWQQGNVFSCSVMHEALHNHYTQKSLSLSPGGGGGSSPGQGTQSENSCTHFPGNLPNMLRDLRDAFSRVKTFFQMKGQLDNLLLKESLLEDFKGYLGCQALSEMIQFYLEEVMPQAENQDPDIKAHVNSLGENLKTLRLRLRRCHRFLPCENGGGSGGKSKAVEQVKNAFNKLQEKGIYKAMSEFDIFINYIEAYMTMKIRN

SEQ ID NO: 1217 - protein, 236 aa, synthetic construct; identical to SEQ ID NO: 944
  REGION 1..236: note = Synthetic

SEQ ID NO: 1218 - protein, 419 aa, synthetic construct; identical to SEQ ID NO: 1098
  REGION 1..419: note = Synthetic

SEQ ID NO: 1219 - protein, 644 aa, synthetic construct
  REGION 1..644: note = Synthetic
MDMRVPAQLLGLLLLWLRGARCQVQLVQSGAEVKKPGASVKVSCKASGYTFTRYDINWVRQATGQGLEWMGWLNPNSGNTGQTQKFRGRVTMTRDTSINTAYMELSSLRSEDTAVYYCARGGYTSAWRWYFDLWGRGTLVTVSSASTKGPSVFPLAPSSKSTSGGTAALGCLVKDYFPEPVTVSWNSGALTSGVHTFPAVLQSSGLYSLSSVVTVPSSSLGTQTYICNVNHKPSNTKVDKKVEPKSCDKTHTCPPCPAPELLGGPSVFLFPPKPKDTLMISRTPEVTCVVVDVSHEDPEVKFNWYVDGVEVHNAKTKPCEEQYGSTYRCVSVLTVLHQDWLNGKEYKCKVSNKALPAPIEKTISKAKGQPREPQVYTLPPSRKEMTKNQVSLTCLVKGFYPSDIAVEWESNGQPENNYKTTPPVLKSDGSFFLYSKLTVDKSRWQQGNVFSCSVMHEALHNHYTQKSLSLSPGGGGGSSPGQGTQSENSCTHFPGNLPNMLRDLRDAFSRVKTFFRMKDQLDNLLLKESLLEDFKGYLGCQALSEMIQFYLEEVMPQAENQDPDIKAHVNSLGENLKTLRLRLRRCHRFLPCENGGGSGGKSKAVEQVKNAFNKLQEKGIYKAMSEFDIFINYIEAYMTMKIRN

SEQ ID NO: 1220 - protein, 236 aa, synthetic construct; identical to SEQ ID NO: 944
  REGION 1..236: note = Synthetic

SEQ ID NO: 1221 - protein, 419 aa, synthetic construct; identical to SEQ ID NO: 1101
  REGION 1..419: note = Synthetic

SEQ ID NO: 1222 - protein, 644 aa, synthetic construct
  REGION 1..644: note = Synthetic
MDMRVPAQLLGLLLLWLRGARCQVQLVQSGAEVKKPGASVKVSCKASGYTFTRYDINWVRQATGQGLEWMGWLNPNSGNTGQTQKFRGRVTMTRDTSINTAYMELSSLRSEDTAVYYCARGGYTSAWRWYFDLWGRGTLVTVSSASTKGPSVFPLAPSSKSTSGGTAALGCLVKDYFPEPVTVSWNSGALTSGVHTFPAVLQSSGLYSLSSVVTVPSSSLGTQTYICNVNHKPSNTKVDKKVEPKSCDKTHTCPPCPAPELLGGPSVFLFPPKPKDTLMISRTPEVTCVVVDVSHEDPEVKFNWYVDGVEVHNAKTKPCEEQYGSTYRCVSVLTVLHQDWLNGKEYKCKVSNKALPAPIEKTISKAKGQPREPQVYTLPPSRKEMTKNQVSLTCLVKGFYPSDIAVEWESNGQPENNYKTTPPVLKSDGSFFLYSKLTVDKSRWQQGNVFSCSVMHEALHNHYTQKSLSLSPGGGGGSSPGQGTQSENSCTHFPGNLPNMLRDLRDAFSRVKTFFQMKDQLDNKLLKESLLEDFKGYLGCQALSEMIQFYLEEVMPQAENQDPDIKAHVNSLGENLKTLRLRLRRCHRFLPCENGGGSGGKSKAVEQVKNAFNKLQEKGIYKAMSEFDIFINYIEAYMTMKIRN

SEQ ID NO: 1223 - protein, 236 aa, synthetic construct; identical to SEQ ID NO: 944
  REGION 1..236: note = Synthetic

SEQ ID NO: 1224 - protein, 419 aa, synthetic construct; identical to SEQ ID NO: 1104
  REGION 1..419: note = Synthetic

SEQ ID NO: 1225 - protein, 644 aa, synthetic construct
  REGION 1..644: note = Synthetic
MDMRVPAQLLGLLLLWLRGARCQVQLVQSGAEVKKPGASVKVSCKASGYTFTRYDINWVRQATGQGLEWMGWLNPNSGNTGQTQKFRGRVTMTRDTSINTAYMELSSLRSEDTAVYYCARGGYTSAWRWYFDLWGRGTLVTVSSASTKGPSVFPLAPSSKSTSGGTAALGCLVKDYFPEPVTVSWNSGALTSGVHTFPAVLQSSGLYSLSSVVTVPSSSLGTQTYICNVNHKPSNTKVDKKVEPKSCDKTHTCPPCPAPELLGGPSVFLFPPKPKDTLMISRTPEVTCVVVDVSHEDPEVKFNWYVDGVEVHNAKTKPCEEQYGSTYRCVSVLTVLHQDWLNGKEYKCKVSNKALPAPIEKTISKAKGQPREPQVYTLPPSRKEMTKNQVSLTCLVKGFYPSDIAVEWESNGQPENNYKTTPPVLKSDGSFFLYSKLTVDKSRWQQGNVFSCSVMHEALHNHYTQKSLSLSPGGGGGSSPGQGTQSENSCTHFPGNLPNMLRDLRDAFSRVDTFFQMKDQLDNLLLKESLLEDFKGYLGCQALSEMIQFYLEEVMPQAENQDPDIKAHVNSLGENLKTLRLRLRRCHRFLPCENGGGSGGKSKAVEQVKNAFNKLQEKGIYKAMSEFDIFINYIEAYMTMKIRN

SEQ ID NO: 1226 - protein, 236 aa, synthetic construct; identical to SEQ ID NO: 944
  REGION 1..236: note = Synthetic

SEQ ID NO: 1227 - protein, 419 aa, synthetic construct; identical to SEQ ID NO: 1107
  REGION 1..419: note = Synthetic

SEQ ID NO: 1228 - protein, 644 aa, synthetic construct
  REGION 1..644: note = Synthetic
MDMRVPAQLLGLLLLWLRGARCQVQLVQSGAEVKKPGASVKVSCKASGYTFTRYDINWVRQATGQGLEWMGWLNPNSGNTGQTQKFRGRVTMTRDTSINTAYMELSSLRSEDTAVYYCARGGYTSAWRWYFDLWGRGTLVTVSSASTKGPSVFPLAPSSKSTSGGTAALGCLVKDYFPEPVTVSWNSGALTSGVHTFPAVLQSSGLYSLSSVVTVPSSSLGTQTYICNVNHKPSNTKVDKKVEPKSCDKTHTCPPCPAPELLGGPSVFLFPPKPKDTLMISRTPEVTCVVVDVSHEDPEVKFNWYVDGVEVHNAKTKPCEEQYGSTYRCVSVLTVLHQDWLNGKEYKCKVSNKALPAPIEKTISKAKGQPREPQVYTLPPSRKEMTKNQVSLTCLVKGFYPSDIAVEWESNGQPENNYKTTPPVLKSDGSFFLYSKLTVDKSRWQQGNVFSCSVMHEALHNHYTQKSLSLSPGGGGGSSPGQGTQSENSCTHFPGNLPNMLRDLRDAFSRVKTFFEMKDQLDNLLLKESLLEDFKGYLGCQALSEMIQFYLEEVMPQAENQDPDIKAHVNSLGENLKTLRLRLRRCHRFLPCENGGGSGGKSKAVEQVKNAFNKLQEKGIYKAMSEFDIFINYIEAYMTMKIRN

SEQ ID NO: 1229 - protein, 236 aa, synthetic construct; identical to SEQ ID NO: 944
  REGION 1..236: note = Synthetic

SEQ ID NO: 1230 - protein, 419 aa, synthetic construct; identical to SEQ ID NO: 1110
  REGION 1..419: note = Synthetic

SEQ ID NO: 1231 - protein, 645 aa, synthetic construct
  REGION 1..645: note = Synthetic
MDMRVPAQLLGLLLLWLRGARCQVQLVQSGAEVKKPGASVKVSCKASGYTFTSYDINWVRQATGQGLEWMGWMNPNSGNSGSVKKFRDRVTMTRDTSISTAYMELSSLRSEDTAVYYCVRLIGYSSAWKWSFQHWGQGTLVTVSSASTKGPSVFPLAPSSKSTSGGTAALGCLVKDYFPEPVTVSWNSGALTSGVHTFPAVLQSSGLYSLSSVVTVPSSSLGTQTYICNVNHKPSNTKVDKKVEPKSCDKTHTCPPCPAPELLGGPSVFLFPPKPKDTLMISRTPEVTCVVVDVSHEDPEVKFNWYVDGVEVHNAKTKPCEEQYGSTYRCVSVLTVLHQDWLNGKEYKCKVSNKALPAPIEKTISKAKGQPREPQVYTLPPSRKEMTKNQVSLTCLVKGFYPSDIAVEWESNGQPENNYKTTPPVLKSDGSFFLYSKLTVDKSRWQQGNVFSCSVMHEALHNHYTQKSLSLSPGGGGGSSPGQGTQSENSCTHFPGNLPNMLRDLLDAFSRVKTFFQMKDQLDNLLLKESLLEDFKGYLGCQALSEMIQFYLEEVMPQAENQDPDIKAHVNSLGENLKTLRLRLRRCHRFLPCENGGGSGGKSKAVEQVKNAFNKLQEKGIYKAMSEFDIFINYIEAYMTMKIRN

SEQ ID NO: 1232 - protein, 236 aa, synthetic construct; identical to SEQ ID NO: 85
  REGION 1..236: note = Synthetic

SEQ ID NO: 1233 - protein, 419 aa, synthetic construct; identical to SEQ ID NO: 1104
  REGION 1..419: note = Synthetic

SEQ ID NO: 1234 - protein, 645 aa, synthetic construct
  REGION 1..645: note = Synthetic
MDMRVPAQLLGLLLLWLRGARCQVQLVQSGAEVKKPGASVKVSCKASGYTFTSYDINWVRQATGQGLEWMGWMNPNSGNSGSVKKFRDRVTMTRDTSISTAYMELSSLRSEDTAVYYCVRLIGYSSAWKWSFQHWGQGTLVTVSSASTKGPSVFPLAPSSKSTSGGTAALGCLVKDYFPEPVTVSWNSGALTSGVHTFPAVLQSSGLYSLSSVVTVPSSSLGTQTYICNVNHKPSNTKVDKKVEPKSCDKTHTCPPCPAPELLGGPSVFLFPPKPKDTLMISRTPEVTCVVVDVSHEDPEVKFNWYVDGVEVHNAKTKPCEEQYGSTYRCVSVLTVLHQDWLNGKEYKCKVSNKALPAPIEKTISKAKGQPREPQVYTLPPSRKEMTKNQVSLTCLVKGFYPSDIAVEWESNGQPENNYKTTPPVLKSDGSFFLYSKLTVDKSRWQQGNVFSCSVMHEALHNHYTQKSLSLSPGGGGGSSPGQGTQSENSCTHFPGNLPNMLRDLRDAFSRVKTFFQMKDQLDNLLLKESLLEDFKGYLGCQALSEMIQFYLEEVMPQAENQDPDIKAHVNSLGENLKTLRLRLRRCHRFLPCENGGGSGGKSKAVEQVKNAFNKLQEKGIYLAMSEFDIFINYIEAYMTMKIRN

SEQ ID NO: 1235 - protein, 236 aa, synthetic construct; identical to SEQ ID NO: 85
  REGION 1..236: note = Synthetic

SEQ ID NO: 1236 - protein, 419 aa, synthetic construct; identical to SEQ ID NO: 1098
  REGION 1..419: note = Synthetic

SEQ ID NO: 1237 - protein, 645 aa, synthetic construct
  REGION 1..645: note = Synthetic
MDMRVPAQLLGLLLLWLRGARCQVQLVQSGAEVKKPGASVKVSCKASGYTFTSYDINWVRQATGQGLEWMGWMNPNSGNSGSVKKFRDRVTMTRDTSISTAYMELSSLRSEDTAVYYCVRLIGYSSAWKWSFQHWGQGTLVTVSSASTKGPSVFPLAPSSKSTSGGTAALGCLVKDYFPEPVTVSWNSGALTSGVHTFPAVLQSSGLYSLSSVVTVPSSSLGTQTYICNVNHKPSNTKVDKKVEPKSCDKTHTCPPCPAPELLGGPSVFLFPPKPKDTLMISRTPEVTCVVVDVSHEDPEVKFNWYVDGVEVHNAKTKPCEEQYGSTYRCVSVLTVLHQDWLNGKEYKCKVSNKALPAPIEKTISKAKGQPREPQVYTLPPSRKEMTKNQVSLTCLVKGFYPSDIAVEWESNGQPENNYKTTPPVLKSDGSFFLYSKLTVDKSRWQQGNVFSCSVMHEALHNHYTQKSLSLSPGGGGGSSPGQGTQSENSCTHFPGNLPNMLRDLRDAFSRVKTFFQMKDQLDNLLLKESLLEDFKGYLGCQALSEMIQFYLEEVMPQAENQDPDIKAHVNSLGENLKTLRLRLRRCHRFLPCENGGGSGGKSKAVEQVKNAFNKLQEKGIYDAMSEFDIFINYIEAYMTMKIRN

SEQ ID NO: 1238 - protein, 236 aa, synthetic construct; identical to SEQ ID NO: 85
  REGION 1..236: note = Synthetic

SEQ ID NO: 1239 - protein, 419 aa, synthetic construct; identical to SEQ ID NO: 1089
  REGION 1..419: note = Synthetic

SEQ ID NO: 1240 - protein, 645 aa, synthetic construct
  REGION 1..645: note = Synthetic
MDMRVPAQLLGLLLLWLRGARCQVQLVQSGAEVKKPGASVKVSCKASGYTFTSYDINWVRQATGQGLEWMGWMNPNSGNSGSVKKFRDRVTMTRDTSISTAYMELSSLRSEDTAVYYCVRLIGYSSAWKWSFQHWGQGTLVTVSSASTKGPSVFPLAPSSKSTSGGTAALGCLVKDYFPEPVTVSWNSGALTSGVHTFPAVLQSSGLYSLSSVVTVPSSSLGTQTYICNVNHKPSNTKVDKKVEPKSCDKTHTCPPCPAPELLGGPSVFLFPPKPKDTLMISRTPEVTCVVVDVSHEDPEVKFNWYVDGVEVHNAKTKPCEEQYGSTYRCVSVLTVLHQDWLNGKEYKCKVSNKALPAPIEKTISKAKGQPREPQVYTLPPSRKEMTKNQVSLTCLVKGFYPSDIAVEWESNGQPENNYKTTPPVLKSDGSFFLYSKLTVDKSRWQQGNVFSCSVMHEALHNHYTQKSLSLSPGGGGGSSPGQGTQSENSCTHFPGNLPNMLRDLRDAFSRVKTFFQMKGQLDNLLLKESLLEDFKGYLGCQALSEMIQFYLEEVMPQAENQDPDIKAHVNSLGENLKTLRLRLRRCHRFLPCENGGGSGGKSKAVEQVKNAFNKLQEKGIYKAMSEFDIFINYIEAYMTMKIRN

SEQ ID NO: 1241 - protein, 236 aa, synthetic construct; identical to SEQ ID NO: 85
  REGION 1..236: note = Synthetic

SEQ ID NO: 1242 - protein, 419 aa, synthetic construct; identical to SEQ ID NO: 1110
  REGION 1..419: note = Synthetic

SEQ ID NO: 1243 - protein, 645 aa, synthetic construct
  REGION 1..645: note = Synthetic
MDMRVPAQLLGLLLLWLRGARCQVQLVQSGAEVKKPGASVKVSCKASGYTFTSYDINWVRQATGQGLEWMGWMNPNSGNSGSVKKFRDRVTMTRDTSISTAYMELSSLRSEDTAVYYCVRLIGYSSAWKWSFQHWGQGTLVTVSSASTKGPSVFPLAPSSKSTSGGTAALGCLVKDYFPEPVTVSWNSGALTSGVHTFPAVLQSSGLYSLSSVVTVPSSSLGTQTYICNVNHKPSNTKVDKKVEPKSCDKTHTCPPCPAPELLGGPSVFLFPPKPKDTLMISRTPEVTCVVVDVSHEDPEVKFNWYVDGVEVHNAKTKPCEEQYGSTYRCVSVLTVLHQDWLNGKEYKCKVSNKALPAPIEKTISKAKGQPREPQVYTLPPSRKEMTKNQVSLTCLVKGFYPSDIAVEWESNGQPENNYKTTPPVLKSDGSFFLYSKLTVDKSRWQQGNVFSCSVMHEALHNHYTQKSLSLSPGGGGGSSPGQGTQSENSCTHFPGNLPNMLRDLRDAFSRVKTFFRMKDQLDNLLLKESLLEDFKGYLGCQALSEMIQFYLEEVMPQAENQDPDIKAHVNSLGENLKTLRLRLRRCHRFLPCENGGGSGGKSKAVEQVKNAFNKLQEKGIYKAMSEFDIFINYIEAYMTMKIRN

SEQ ID NO: 1244 - protein, 236 aa, synthetic construct; identical to SEQ ID NO: 85
  REGION 1..236: note = Synthetic

SEQ ID NO: 1245 - protein, 419 aa, synthetic construct; identical to SEQ ID NO: 1092
  REGION 1..419: note = Synthetic

SEQ ID NO: 1246 - protein, 645 aa, synthetic construct
  REGION 1..645: note = Synthetic
MDMRVPAQLLGLLLLWLRGARCQVQLVQSGAEVKKPGASVKVSCKASGYTFTSYDINWVRQATGQGLEWMGWMNPNSGNSGSVKKFRDRVTMTRDTSISTAYMELSSLRSEDTAVYYCVRLIGYSSAWKWSFQHWGQGTLVTVSSASTKGPSVFPLAPSSKSTSGGTAALGCLVKDYFPEPVTVSWNSGALTSGVHTFPAVLQSSGLYSLSSVVTVPSSSLGTQTYICNVNHKPSNTKVDKKVEPKSCDKTHTCPPCPAPELLGGPSVFLFPPKPKDTLMISRTPEVTCVVVDVSHEDPEVKFNWYVDGVEVHNAKTKPCEEQYGSTYRCVSVLTVLHQDWLNGKEYKCKVSNKALPAPIEKTISKAKGQPREPQVYTLPPSRKEMTKNQVSLTCLVKGFYPSDIAVEWESNGQPENNYKTTPPVLKSDGSFFLYSKLTVDKSRWQQGNVFSCSVMHEALHNHYTQKSLSLSPGGGGGSSPGQGTQSENSCTHFPGNLPNMLRDLRDAFSRVKTFFQMKDQLDNKLLKESLLEDFKGYLGCQALSEMIQFYLEEVMPQAENQDPDIKAHVNSLGENLKTLRLRLRRCHRFLPCENGGGSGGKSKAVEQVKNAFNKLQEKGIYKAMSEFDIFINYIEAYMTMKIRN

SEQ ID NO: 1247 - protein, 236 aa, synthetic construct; identical to SEQ ID NO: 85
  REGION 1..236: note = Synthetic

SEQ ID NO: 1248 - protein, 419 aa, synthetic construct; identical to SEQ ID NO: 1107
  REGION 1..419: note = Synthetic

SEQ ID NO: 1249 - protein, 645 aa, synthetic construct
  REGION 1..645: note = Synthetic
MDMRVPAQLLGLLLLWLRGARCQVQLVQSGAEVKKPGASVKVSCKASGYTFTSYDINWVRQATGQGLEWMGWMNPNSGNSGSVKKFRDRVTMTRDTSISTAYMELSSLRSEDTAVYYCVRLIGYSSAWKWSFQHWGQGTLVTVSSASTKGPSVFPLAPSSKSTSGGTAALGCLVKDYFPEPVTVSWNSGALTSGVHTFPAVLQSSGLYSLSSVVTVPSSSLGTQTYICNVNHKPSNTKVDKKVEPKSCDKTHTCPPCPAPELLGGPSVFLFPPKPKDTLMISRTPEVTCVVVDVSHEDPEVKFNWYVDGVEVHNAKTKPCEEQYGSTYRCVSVLTVLHQDWLNGKEYKCKVSNKALPAPIEKTISKAKGQPREPQVYTLPPSRKEMTKNQVSLTCLVKGFYPSDIAVEWESNGQPENNYKTTPPVLKSDGSFFLYSKLTVDKSRWQQGNVFSCSVMHEALHNHYTQKSLSLSPGGGGGSSPGQGTQSENSCTHFPGNLPNMLRDLRDAFSRVDTFFQMKDQLDNLLLKESLLEDFKGYLGCQALSEMIQFYLEEVMPQAENQDPDIKAHVNSLGENLKTLRLRLRRCHRFLPCENGGGSGGKSKAVEQVKNAFNKLQEKGIYKAMSEFDIFINYIEAYMTMKIRN

SEQ ID NO: 1250 - protein, 236 aa, synthetic construct; identical to SEQ ID NO: 85
  REGION 1..236: note = Synthetic

SEQ ID NO: 1251 - protein, 419 aa, synthetic construct; identical to SEQ ID NO: 1101
  REGION 1..419: note = Synthetic

SEQ ID NO: 1252 - protein, 645 aa, synthetic construct
  REGION 1..645: note = Synthetic
MDMRVPAQLLGLLLLWLRGARCQVQLVQSGAEVKKPGASVKVSCKASGYTFTSYDINWVRQATGQGLEWMGWMNPNSGNSGSVKKFRDRVTMTRDTSISTAYMELSSLRSEDTAVYYCVRLIGYSSAWKWSFQHWGQGTLVTVSSASTKGPSVFPLAPSSKSTSGGTAALGCLVKDYFPEPVTVSWNSGALTSGVHTFPAVLQSSGLYSLSSVVTVPSSSLGTQTYICNVNHKPSNTKVDKKVEPKSCDKTHTCPPCPAPELLGGPSVFLFPPKPKDTLMISRTPEVTCVVVDVSHEDPEVKFNWYVDGVEVHNAKTKPCEEQYGSTYRCVSVLTVLHQDWLNGKEYKCKVSNKALPAPIEKTISKAKGQPREPQVYTLPPSRKEMTKNQVSLTCLVKGFYPSDIAVEWESNGQPENNYKTTPPVLKSDGSFFLYSKLTVDKSRWQQGNVFSCSVMHEALHNHYTQKSLSLSPGGGGGSSPGQGTQSENSCTHFPGNLPNMLRDLRDAFSRVKTFFEMKDQLDNLLLKESLLEDFKGYLGCQALSEMIQFYLEEVMPQAENQDPDIKAHVNSLGENLKTLRLRLRRCHRFLPCENGGGSGGKSKAVEQVKNAFNKLQEKGIYKAMSEFDIFINYIEAYMTMKIRN

SEQ ID NO: 1253 - protein, 236 aa, synthetic construct; identical to SEQ ID NO: 85
  REGION 1..236: note = Synthetic

SEQ ID NO: 1254 - protein, 419 aa, synthetic construct; identical to SEQ ID NO: 1095
  REGION 1..419: note = Synthetic

SEQ ID NO: 1255 - protein, 644 aa, synthetic construct
  REGION 1..644: note = Synthetic
MDMRVPAQLLGLLLLWLRGARCQVQLVQSGAEVKKPGASVKVSCKASGYTFTSYDINWVRQATGQGLEWMGRMNPKSGNAGYVQNFRGRVTMTRDTSISTAYMELSSLRSEDTAVYYCARGGRTSIWSFVFDYWGQGTLVTVSSASTKGPSVFPLAPSSKSTSGGTAALGCLVKDYFPEPVTVSWNSGALTSGVHTFPAVLQSSGLYSLSSVVTVPSSSLGTQTYICNVNHKPSNTKVDKKVEPKSCDKTHTCPPCPAPELLGGPSVFLFPPKPKDTLMISRTPEVTCVVVDVSHEDPEVKFNWYVDGVEVHNAKTKPCEEQYGSTYRCVSVLTVLHQDWLNGKEYKCKVSNKALPAPIEKTISKAKGQPREPQVYTLPPSRKEMTKNQVSLTCLVKGFYPSDIAVEWESNGQPENNYKTTPPVLKSDGSFFLYSKLTVDKSRWQQGNVFSCSVMHEALHNHYTQKSLSLSPGGGGGSSPGQGTQSENSCTHFPGNLPNMLRDLLDAFSRVKTFFQMKDQLDNLLLKESLLEDFKGYLGCQALSEMIQFYLEEVMPQAENQDPDIKAHVNSLGENLKTLRLRLRRCHRFLPCENGGGSGGKSKAVEQVKNAFNKLQEKGIYKAMSEFDIFINYIEAYMTMKIRN

SEQ ID NO: 1256 - protein, 236 aa, synthetic construct; identical to SEQ ID NO: 65
  REGION 1..236: note = Synthetic

SEQ ID NO: 1257 - protein, 419 aa, synthetic construct; identical to SEQ ID NO: 1089
  REGION 1..419: note = Synthetic

SEQ ID NO: 1258 - protein, 644 aa, synthetic construct
  REGION 1..644: note = Synthetic
MDMRVPAQLLGLLLLWLRGARCQVQLVQSGAEVKKPGASVKVSCKASGYTFTSYDINWVRQATGQGLEWMGRMNPKSGNAGYVQNFRGRVTMTRDTSISTAYMELSSLRSEDTAVYYCARGGRTSIWSFVFDYWGQGTLVTVSSASTKGPSVFPLAPSSKSTSGGTAALGCLVKDYFPEPVTVSWNSGALTSGVHTFPAVLQSSGLYSLSSVVTVPSSSLGTQTYICNVNHKPSNTKVDKKVEPKSCDKTHTCPPCPAPELLGGPSVFLFPPKPKDTLMISRTPEVTCVVVDVSHEDPEVKFNWYVDGVEVHNAKTKPCEEQYGSTYRCVSVLTVLHQDWLNGKEYKCKVSNKALPAPIEKTISKAKGQPREPQVYTLPPSRKEMTKNQVSLTCLVKGFYPSDIAVEWESNGQPENNYKTTPPVLKSDGSFFLYSKLTVDKSRWQQGNVFSCSVMHEALHNHYTQKSLSLSPGGGGGSSPGQGTQSENSCTHFPGNLPNMLRDLRDAFSRVKTFFQMKDQLDNLLLKESLLEDFKGYLGCQALSEMIQFYLEEVMPQAENQDPDIKAHVNSLGENLKTLRLRLRRCHRFLPCENGGGSGGKSKAVEQVKNAFNKLQEKGIYLAMSEFDIFINYIEAYMTMKIRN

SEQ ID NO: 1259 - protein, 236 aa, synthetic construct; identical to SEQ ID NO: 65
  REGION 1..236: note = Synthetic

SEQ ID NO: 1260 - protein, 419 aa, synthetic construct; identical to SEQ ID NO: 1092
  REGION 1..419: note = Synthetic

SEQ ID NO: 1261 - protein, 644 aa, synthetic construct
  REGION 1..644: note = Synthetic
MDMRVPAQLLGLLLLWLRGARCQVQLVQSGAEVKKPGASVKVSCKASGYTFTSYDINWVRQATGQGLEWMGRMNPKSGNAGYVQNFRGRVTMTRDTSISTAYMELSSLRSEDTAVYYCARGGRTSIWSFVFDYWGQGTLVTVSSASTKGPSVFPLAPSSKSTSGGTAALGCLVKDYFPEPVTVSWNSGALTSGVHTFPAVLQSSGLYSLSSVVTVPSSSLGTQTYICNVNHKPSNTKVDKKVEPKSCDKTHTCPPCPAPELLGGPSVFLFPPKPKDTLMISRTPEVTCVVVDVSHEDPEVKFNWYVDGVEVHNAKTKPCEEQYGSTYRCVSVLTVLHQDWLNGKEYKCKVSNKALPAPIEKTISKAKGQPREPQVYTLPPSRKEMTKNQVSLTCLVKGFYPSDIAVEWESNGQPENNYKTTPPVLKSDGSFFLYSKLTVDKSRWQQGNVFSCSVMHEALHNHYTQKSLSLSPGGGGGSSPGQGTQSENSCTHFPGNLPNMLRDLRDAFSRVKTFFQMKDQLDNLLLKESLLEDFKGYLGCQALSEMIQFYLEEVMPQAENQDPDIKAHVNSLGENLKTLRLRLRRCHRFLPCENGGGSGGKSKAVEQVKNAFNKLQEKGIYDAMSEFDIFINYIEAYMTMKIRN

SEQ ID NO: 1262 - protein, 236 aa, synthetic construct; identical to SEQ ID NO: 65
  REGION 1..236: note = Synthetic

SEQ ID NO: 1263 - protein, 419 aa, synthetic construct; identical to SEQ ID NO: 1095
  REGION 1..419: note = Synthetic

SEQ ID NO: 1264 - protein, 644 aa, synthetic construct
  REGION 1..644: note = Synthetic
MDMRVPAQLLGLLLLWLRGARCQVQLVQSGAEVKKPGASVKVSCKASGYTFTSYDINWVRQATGQGLEWMGRMNPKSGNAGYVQNFRGRVTMTRDTSISTAYMELSSLRSEDTAVYYCARGGRTSIWSFVFDYWGQGTLVTVSSASTKGPSVFPLAPSSKSTSGGTAALGCLVKDYFPEPVTVSWNSGALTSGVHTFPAVLQSSGLYSLSSVVTVPSSSLGTQTYICNVNHKPSNTKVDKKVEPKSCDKTHTCPPCPAPELLGGPSVFLFPPKPKDTLMISRTPEVTCVVVDVSHEDPEVKFNWYVDGVEVHNAKTKPCEEQYGSTYRCVSVLTVLHQDWLNGKEYKCKVSNKALPAPIEKTISKAKGQPREPQVYTLPPSRKEMTKNQVSLTCLVKGFYPSDIAVEWESNGQPENNYKTTPPVLKSDGSFFLYSKLTVDKSRWQQGNVFSCSVMHEALHNHYTQKSLSLSPGGGGGSSPGQGTQSENSCTHFPGNLPNMLRDLRDAFSRVKTFFQMKGQLDNLLLKESLLEDFKGYLGCQALSEMIQFYLEEVMPQAENQDPDIKAHVNSLGENLKTLRLRLRRCHRFLPCENGGGSGGKSKAVEQVKNAFNKLQEKGIYKAMSEFDIFINYIEAYMTMKIRN

SEQ ID NO: 1265 - protein, 236 aa, synthetic construct; identical to SEQ ID NO: 65
  REGION 1..236: note = Synthetic

SEQ ID NO: 1266 - protein, 419 aa, synthetic construct; identical to SEQ ID NO: 1098
  REGION 1..419: note = Synthetic

SEQ ID NO: 1267 - protein, 644 aa, synthetic construct
  REGION 1..644: note = Synthetic
MDMRVPAQLLGLLLLWLRGARCQVQLVQSGAEVKKPGASVKVSCKASGYTFTSYDINWVRQATGQGLEWMGRMNPKSGNAGYVQNFRGRVTMTRDTSISTAYMELSSLRSEDTAVYYCARGGRTSIWSFVFDYWGQGTLVTVSSASTKGPSVFPLAPSSKSTSGGTAALGCLVKDYFPEPVTVSWNSGALTSGVHTFPAVLQSSGLYSLSSVVTVPSSSLGTQTYICNVNHKPSNTKVDKKVEPKSCDKTHTCPPCPAPELLGGPSVFLFPPKPKDTLMISRTPEVTCVVVDVSHEDPEVKFNWYVDGVEVHNAKTKPCEEQYGSTYRCVSVLTVLHQDWLNGKEYKCKVSNKALPAPIEKTISKAKGQPREPQVYTLPPSRKEMTKNQVSLTCLVKGFYPSDIAVEWESNGQPENNYKTTPPVLKSDGSFFLYSKLTVDKSRWQQGNVFSCSVMHEALHNHYTQKSLSLSPGGGGGSSPGQGTQSENSCTHFPGNLPNMLRDLRDAFSRVKTFFRMKDQLDNLLLKESLLEDFKGYLGCQALSEMIQFYLEEVMPQAENQDPDIKAHVNSLGENLKTLRLRLRRCHRFLPCENGGGSGGKSKAVEQVKNAFNKLQEKGIYKAMSEFDIFINYIEAYMTMKIRN

SEQ ID NO: 1268 - protein, 236 aa, synthetic construct; identical to SEQ ID NO: 65
  REGION 1..236: note = Synthetic

SEQ ID NO: 1269 - protein, 419 aa, synthetic construct; identical to SEQ ID NO: 1101
  REGION 1..419: note = Synthetic

SEQ ID NO: 1270 - protein, 644 aa, synthetic construct
  REGION 1..644: note = Synthetic
MDMRVPAQLLGLLLLWLRGARCQVQLVQSGAEVKKPGASVKVSCKASGYTFTSYDINWVRQATGQGLEWMGRMNPKSGNAGYVQNFRGRVTMTRDTSISTAYMELSSLRSEDTAVYYCARGGRTSIWSFVFDYWGQGTLVTVSSASTKGPSVFPLAPSSKSTSGGTAALGCLVKDYFPEPVTVSWNSGALTSGVHTFPAVLQSSGLYSLSSVVTVPSSSLGTQTYICNVNHKPSNTKVDKKVEPKSCDKTHTCPPCPAPELLGGPSVFLFPPKPKDTLMISRTPEVTCVVVDVSHEDPEVKFNWYVDGVEVHNAKTKPCEEQYGSTYRCVSVLTVLHQDWLNGKEYKCKVSNKALPAPIEKTISKAKGQPREPQVYTLPPSRKEMTKNQVSLTCLVKGFYPSDIAVEWESNGQPENNYKTTPPVLKSDGSFFLYSKLTVDKSRWQQGNVFSCSVMHEALHNHYTQKSLSLSPGGGGGSSPGQGTQSENSCTHFPGNLPNMLRDLRDAFSRVKTFFQMKDQLDNKLLKESLLEDFKGYLGCQALSEMIQFYLEEVMPQAENQDPDIKAHVNSLGENLKTLRLRLRRCHRFLPCENGGGSGGKSKAVEQVKNAFNKLQEKGIYKAMSEFDIFINYIEAYMTMKIRN

SEQ ID NO: 1271 - protein, 236 aa, synthetic construct; identical to SEQ ID NO: 65
  REGION 1..236: note = Synthetic

SEQ ID NO: 1272 - protein, 419 aa, synthetic construct; identical to SEQ ID NO: 1104
  REGION 1..419: note = Synthetic

SEQ ID NO: 1273 - protein, 644 aa, synthetic construct
  REGION 1..644: note = Synthetic
MDMRVPAQLLGLLLLWLRGARCQVQLVQSGAEVKKPGASVKVSCKASGYTFTSYDINWVRQATGQGLEWMGRMNPKSGNAGYVQNFRGRVTMTRDTSISTAYMELSSLRSEDTAVYYCARGGRTSIWSFVFDYWGQGTLVTVSSASTKGPSVFPLAPSSKSTSGGTAALGCLVKDYFPEPVTVSWNSGALTSGVHTFPAVLQSSGLYSLSSVVTVPSSSLGTQTYICNVNHKPSNTKVDKKVEPKSCDKTHTCPPCPAPELLGGPSVFLFPPKPKDTLMISRTPEVTCVVVDVSHEDPEVKFNWYVDGVEVHNAKTKPCEEQYGSTYRCVSVLTVLHQDWLNGKEYKCKVSNKALPAPIEKTISKAKGQPREPQVYTLPPSRKEMTKNQVSLTCLVKGFYPSDIAVEWESNGQPENNYKTTPPVLKSDGSFFLYSKLTVDKSRWQQGNVFSCSVMHEALHNHYTQKSLSLSPGGGGGSSPGQGTQSENSCTHFPGNLPNMLRDLRDAFSRVDTFFQMKDQLDNLLLKESLLEDFKGYLGCQALSEMIQFYLEEVMPQAENQDPDIKAHVNSLGENLKTLRLRLRRCHRFLPCENGGGSGGKSKAVEQVKNAFNKLQEKGIYKAMSEFDIFINYIEAYMTMKIRN

SEQ ID NO: 1274 - protein, 236 aa, synthetic construct; identical to SEQ ID NO: 65
  REGION 1..236: note = Synthetic

SEQ ID NO: 1275 - protein, 419 aa, synthetic construct; identical to SEQ ID NO: 1107
  REGION 1..419: note = Synthetic

SEQ ID NO: 1276 - protein, 644 aa, synthetic construct
  REGION 1..644: note = Synthetic
MDMRVPAQLLGLLLLWLRGARCQVQLVQSGAEVKKPGASVKVSCKASGYTFTSYDINWVRQATGQGLEWMGRMNPKSGNAGYVQNFRGRVTMTRDTSISTAYMELSSLRSEDTAVYYCARGGRTSIWSFVFDYWGQGTLVTVSSASTKGPSVFPLAPSSKSTSGGTAALGCLVKDYFPEPVTVSWNSGALTSGVHTFPAVLQSSGLYSLSSVVTVPSSSLGTQTYICNVNHKPSNTKVDKKVEPKSCDKTHTCPPCPAPELLGGPSVFLFPPKPKDTLMISRTPEVTCVVVDVSHEDPEVKFNWYVDGVEVHNAKTKPCEEQYGSTYRCVSVLTVLHQDWLNGKEYKCKVSNKALPAPIEKTISKAKGQPREPQVYTLPPSRKEMTKNQVSLTCLVKGFYPSDIAVEWESNGQPENNYKTTPPVLKSDGSFFLYSKLTVDKSRWQQGNVFSCSVMHEALHNHYTQKSLSLSPGGGGGSSPGQGTQSENSCTHFPGNLPNMLRDLRDAFSRVKTFFEMKDQLDNLLLKESLLEDFKGYLGCQALSEMIQFYLEEVMPQAENQDPDIKAHVNSLGENLKTLRLRLRRCHRFLPCENGGGSGGKSKAVEQVKNAFNKLQEKGIYKAMSEFDIFINYIEAYMTMKIRN

SEQ ID NO: 1277 - protein, 236 aa, synthetic construct; identical to SEQ ID NO: 65
  REGION 1..236: note = Synthetic

SEQ ID NO: 1278 - protein, 419 aa, synthetic construct; identical to SEQ ID NO: 1110
  REGION 1..419: note = Synthetic

SEQ ID NO: 1279 - protein, 646 aa, synthetic construct
  REGION 1..646: note = Synthetic
MDMRVPAQLLGLLLLWLRGARCQVQLVQSGAEVKKPGASVKVSCKASGYTFTSYDINWVRQATGQGLEWMGWMNPNRGNTGYVKKFQGRVTMTRDTSISTAYMELSSLRSEDTAVYYCARRRAVYRSSWEWYFDLWGRGTLVTVSSASTKGPSVFPLAPSSKSTSGGTAALGCLVKDYFPEPVTVSWNSGALTSGVHTFPAVLQSSGLYSLSSVVTVPSSSLGTQTYICNVNHKPSNTKVDKKVEPKSCDKTHTCPPCPAPELLGGPSVFLFPPKPKDTLMISRTPEVTCVVVDVSHEDPEVKFNWYVDGVEVHNAKTKPCEEQYGSTYRCVSVLTVLHQDWLNGKEYKCKVSNKALPAPIEKTISKAKGQPREPQVYTLPPSRKEMTKNQVSLTCLVKGFYPSDIAVEWESNGQPENNYKTTPPVLKSDGSFFLYSKLTVDKSRWQQGNVFSCSVMHEALHNHYTQKSLSLSPGGGGGSSPGQGTQSENSCTHFPGNLPNMLRDLLDAFSRVKTFFQMKDQLDNLLLKESLLEDFKGYLGCQALSEMIQFYLEEVMPQAENQDPDIKAHVNSLGENLKTLRLRLRRCHRFLPCENGGGSGGKSKAVEQVKNAFNKLQEKGIYKAMSEFDIFINYIEAYMTMKIRN

SEQ ID NO: 1280 - protein, 236 aa, synthetic construct; identical to SEQ ID NO: 45
  REGION 1..236: note = Synthetic

SEQ ID NO: 1281 - protein, 419 aa, synthetic construct; identical to SEQ ID NO: 1089
  REGION 1..419: note = Synthetic

SEQ ID NO: 1282 - protein, 646 aa, synthetic construct
  REGION 1..646: note = Synthetic
MDMRVPAQLLGLLLLWLRGARCQVQLVQSGAEVKKPGASVKVSCKASGYTFTSYDINWVRQATGQGLEWMGWMNPNRGNTGYVKKFQGRVTMTRDTSISTAYMELSSLRSEDTAVYYCARRRAVYRSSWEWYFDLWGRGTLVTVSSASTKGPSVFPLAPSSKSTSGGTAALGCLVKDYFPEPVTVSWNSGALTSGVHTFPAVLQSSGLYSLSSVVTVPSSSLGTQTYICNVNHKPSNTKVDKKVEPKSCDKTHTCPPCPAPELLGGPSVFLFPPKPKDTLMISRTPEVTCVVVDVSHEDPEVKFNWYVDGVEVHNAKTKPCEEQYGSTYRCVSVLTVLHQDWLNGKEYKCKVSNKALPAPIEKTISKAKGQPREPQVYTLPPSRKEMTKNQVSLTCLVKGFYPSDIAVEWESNGQPENNYKTTPPVLKSDGSFFLYSKLTVDKSRWQQGNVFSCSVMHEALHNHYTQKSLSLSPGGGGGSSPGQGTQSENSCTHFPGNLPNMLRDLRDAFSRVKTFFQMKDQLDNLLLKESLLEDFKGYLGCQALSEMIQFYLEEVMPQAENQDPDIKAHVNSLGENLKTLRLRLRRCHRFLPCENGGGSGGKSKAVEQVKNAFNKLQEKGIYLAMSEFDIFINYIEAYMTMKIRN

SEQ ID NO: 1283 - protein, 236 aa, synthetic construct; identical to SEQ ID NO: 45
  REGION 1..236: note = Synthetic

SEQ ID NO: 1284 - protein, 419 aa, synthetic construct; identical to SEQ ID NO: 1092
  REGION 1..419: note = Synthetic

SEQ ID NO: 1285 - protein, 646 aa, synthetic construct
  REGION 1..646: note = Synthetic
MDMRVPAQLLGLLLLWLRGARCQVQLVQSGAEVKKPGASVKVSCKASGYTFTSYDINWVRQATGQGLEWMGWMNPNRGNTGYVKKFQGRVTMTRDTSISTAYMELSSLRSEDTAVYYCARRRAVYRSSWEWYFDLWGRGTLVTVSSASTKGPSVFPLAPSSKSTSGGTAALGCLVKDYFPEPVTVSWNSGALTSGVHTFPAVLQSSGLYSLSSVVTVPSSSLGTQTYICNVNHKPSNTKVDKKVEPKSCDKTHTCPPCPAPELLGGPSVFLFPPKPKDTLMISRTPEVTCVVVDVSHEDPEVKFNWYVDGVEVHNAKTKPCEEQYGSTYRCVSVLTVLHQDWLNGKEYKCKVSNKALPAPIEKTISKAKGQPREPQVYTLPPSRKEMTKNQVSLTCLVKGFYPSDIAVEWESNGQPENNYKTTPPVLKSDGSFFLYSKLTVDKSRWQQGNVFSCSVMHEALHNHYTQKSLSLSPGGGGGSSPGQGTQSENSCTHFPGNLPNMLRDLRDAFSRVKTFFQMKDQLDNLLLKESLLEDFKGYLGCQALSEMIQFYLEEVMPQAENQDPDIKAHVNSLGENLKTLRLRLRRCHRFLPCENGGGSGGKSKAVEQVKNAFNKLQEKGIYDAMSEFDIFINYIEAYMTMKIRN

SEQ ID NO: 1286 - protein, 236 aa, synthetic construct; identical to SEQ ID NO: 45
  REGION 1..236: note = Synthetic

SEQ ID NO: 1287 - protein, 419 aa, synthetic construct; identical to SEQ ID NO: 1095
  REGION 1..419: note = Synthetic

SEQ ID NO: 1288 - protein, 646 aa, synthetic construct
  REGION 1..646: note = Synthetic
MDMRVPAQLLGLLLLWLRGARCQVQLVQSGAEVKKPGASVKVSCKASGYTFTSYDINWVRQATGQGLEWMGWMNPNRGNTGYVKKFQGRVTMTRDTSISTAYMELSSLRSEDTAVYYCARRRAVYRSSWEWYFDLWGRGTLVTVSSASTKGPSVFPLAPSSKSTSGGTAALGCLVKDYFPEPVTVSWNSGALTSGVHTFPAVLQSSGLYSLSSVVTVPSSSLGTQTYICNVNHKPSNTKVDKKVEPKSCDKTHTCPPCPAPELLGGPSVFLFPPKPKDTLMISRTPEVTCVVVDVSHEDPEVKFNWYVDGVEVHNAKTKPCEEQYGSTYRCVSVLTVLHQDWLNGKEYKCKVSNKALPAPIEKTISKAKGQPREPQVYTLPPSRKEMTKNQVSLTCLVKGFYPSDIAVEWESNGQPENNYKTTPPVLKSDGSFFLYSKLTVDKSRWQQGNVFSCSVMHEALHNHYTQKSLSLSPGGGGGSSPGQGTQSENSCTHFPGNLPNMLRDLRDAFSRVKTFFQMKGQLDNLLLKESLLEDFKGYLGCQALSEMIQFYLEEVMPQAENQDPDIKAHVNSLGENLKTLRLRLRRCHRFLPCENGGGSGGKSKAVEQVKNAFNKLQEKGIYKAMSEFDIFINYIEAYMTMKIRN

SEQ ID NO: 1289 - protein, 236 aa, synthetic construct; identical to SEQ ID NO: 45
  REGION 1..236: note = Synthetic

SEQ ID NO: 1290 - protein, 419 aa, synthetic construct; identical to SEQ ID NO: 1098
  REGION 1..419: note = Synthetic

SEQ ID NO: 1291 - protein, 646 aa, synthetic construct
  REGION 1..646: note = Synthetic
MDMRVPAQLLGLLLLWLRGARCQVQLVQSGAEVKKPGASVKVSCKASGYTFTSYDINWVRQATGQGLEWMGWMNPNRGNTGYVKKFQGRVTMTRDTSISTAYMELSSLRSEDTAVYYCARRRAVYRSSWEWYFDLWGRGTLVTVSSASTKGPSVFPLAPSSKSTSGGTAALGCLVKDYFPEPVTVSWNSGALTSGVHTFPAVLQSSGLYSLSSVVTVPSSSLGTQTYICNVNHKPSNTKVDKKVEPKSCDKTHTCPPCPAPELLGGPSVFLFPPKPKDTLMISRTPEVTCVVVDVSHEDPEVKFNWYVDGVEVHNAKTKPCEEQYGSTYRCVSVLTVLHQDWLNGKEYKCKVSNKALPAPIEKTISKAKGQPREPQVYTLPPSRKEMTKNQVSLTCLVKGFYPSDIAVEWESNGQPENNYKTTPPVLKSDGSFFLYSKLTVDKSRWQQGNVFSCSVMHEALHNHYTQKSLSLSPGGGGGSSPGQGTQSENSCTHFPGNLPNMLRDLRDAFSRVKTFFRMKDQLDNLLLKESLLEDFKGYLGCQALSEMIQFYLEEVMPQAENQDPDIKAHVNSLGENLKTLRLRLRRCHRFLPCENGGGSGGKSKAVEQVKNAFNKLQEKGIYKAMSEFDIFINYIEAYMTMKIRN

SEQ ID NO: 1292 - protein, 236 aa, synthetic construct; identical to SEQ ID NO: 45
  REGION 1..236: note = Synthetic

SEQ ID NO: 1293 - protein, 419 aa, synthetic construct; identical to SEQ ID NO: 1101
  REGION 1..419: note = Synthetic

SEQ ID NO: 1294 - protein, 646 aa, synthetic construct
  REGION 1..646: note = Synthetic
MDMRVPAQLLGLLLLWLRGARCQVQLVQSGAEVKKPGASVKVSCKASGYTFTSYDINWVRQATGQGLEWMGWMNPNRGNTGYVKKFQGRVTMTRDTSISTAYMELSSLRSEDTAVYYCARRRAVYRSSWEWYFDLWGRGTLVTVSSASTKGPSVFPLAPSSKSTSGGTAALGCLVKDYFPEPVTVSWNSGALTSGVHTFPAVLQSSGLYSLSSVVTVPSSSLGTQTYICNVNHKPSNTKVDKKVEPKSCDKTHTCPPCPAPELLGGPSVFLFPPKPKDTLMISRTPEVTCVVVDVSHEDPEVKFNWYVDGVEVHNAKTKPCEEQYGSTYRCVSVLTVLHQDWLNGKEYKCKVSNKALPAPIEKTISKAKGQPREPQVYTLPPSRKEMTKNQVSLTCLVKGFYPSDIAVEWESNGQPENNYKTTPPVLKSDGSFFLYSKLTVDKSRWQQGNVFSCSVMHEALHNHYTQKSLSLSPGGGGGSSPGQGTQSENSCTHFPGNLPNMLRDLRDAFSRVKTFFQMKDQLDNKLLKESLLEDFKGYLGCQALSEMIQFYLEEVMPQAENQDPDIKAHVNSLGENLKTLRLRLRRCHRFLPCENGGGSGGKSKAVEQVKNAFNKLQEKGIYKAMSEFDIFINYIEAYMTMKIRN

SEQ ID NO: 1295 - protein, 236 aa, synthetic construct; identical to SEQ ID NO: 45
  REGION 1..236: note = Synthetic

SEQ ID NO: 1296 - protein, 419 aa, synthetic construct; identical to SEQ ID NO: 1104
  REGION 1..419: note = Synthetic

SEQ ID NO: 1297 - protein, 646 aa, synthetic construct
  REGION 1..646: note = Synthetic
MDMRVPAQLLGLLLLWLRGARCQVQLVQSGAEVKKPGASVKVSCKASGYTFTSYDINWVRQATGQGLEWMGWMNPNRGNTGYVKKFQGRVTMTRDTSISTAYMELSSLRSEDTAVYYCARRRAVYRSSWEWYFDLWGRGTLVTVSSASTKGPSVFPLAPSSKSTSGGTAALGCLVKDYFPEPVTVSWNSGALTSGVHTFPAVLQSSGLYSLSSVVTVPSSSLGTQTYICNVNHKPSNTKVDKKVEPKSCDKTHTCPPCPAPELLGGPSVFLFPPKPKDTLMISRTPEVTCVVVDVSHEDPEVKFNWYVDGVEVHNAKTKPCEEQYGSTYRCVSVLTVLHQDWLNGKEYKCKVSNKALPAPIEKTISKAKGQPREPQVYTLPPSRKEMTKNQVSLTCLVKGFYPSDIAVEWESNGQPENNYKTTPPVLKSDGSFFLYSKLTVDKSRWQQGNVFSCSVMHEALHNHYTQKSLSLSPGGGGGSSPGQGTQSENSCTHFPGNLPNMLRDLRDAFSRVDTFFQMKDQLDNLLLKESLLEDFKGYLGCQALSEMIQFYLEEVMPQAENQDPDIKAHVNSLGENLKTLRLRLRRCHRFLPCENGGGSGGKSKAVEQVKNAFNKLQEKGIYKAMSEFDIFINYIEAYMTMKIRN

SEQ ID NO: 1298 - protein, 236 aa, synthetic construct; identical to SEQ ID NO: 45
  REGION 1..236: note = Synthetic

SEQ ID NO: 1299 - protein, 419 aa, synthetic construct; identical to SEQ ID NO: 1107
  REGION 1..419: note = Synthetic

SEQ ID NO: 1300 - protein, 646 aa, synthetic construct
  REGION 1..646: note = Synthetic
MDMRVPAQLLGLLLLWLRGARCQVQLVQSGAEVKKPGASVKVSCKASGYTFTSYDINWVRQATGQGLEWMGWMNPNRGNTGYVKKFQGRVTMTRDTSISTAYMELSSLRSEDTAVYYCARRRAVYRSSWEWYFDLWGRGTLVTVSSASTKGPSVFPLAPSSKSTSGGTAALGCLVKDYFPEPVTVSWNSGALTSGVHTFPAVLQSSGLYSLSSVVTVPSSSLGTQTYICNVNHKPSNTKVDKKVEPKSCDKTHTCPPCPAPELLGGPSVFLFPPKPKDTLMISRTPEVTCVVVDVSHEDPEVKFNWYVDGVEVHNAKTKPCEEQYGSTYRCVSVLTVLHQDWLNGKEYKCKVSNKALPAPIEKTISKAKGQPREPQVYTLPPSRKEMTKNQVSLTCLVKGFYPSDIAVEWESNGQPENNYKTTPPVLKSDGSFFLYSKLTVDKSRWQQGNVFSCSVMHEALHNHYTQKSLSLSPGGGGGSSPGQGTQSENSCTHFPGNLPNMLRDLRDAFSRVKTFFEMKDQLDNLLLKESLLEDFKGYLGCQALSEMIQFYLEEVMPQAENQDPDIKAHVNSLGENLKTLRLRLRRCHRFLPCENGGGSGGKSKAVEQVKNAFNKLQEKGIYKAMSEFDIFINYIEAYMTMKIRN

SEQ ID NO: 1301 - protein, 236 aa, synthetic construct; identical to SEQ ID NO: 45
  REGION 1..236: note = Synthetic

SEQ ID NO: 1302 - protein, 419 aa, synthetic construct; identical to SEQ ID NO: 1110
  REGION 1..419: note = Synthetic

SEQ ID NO: 1303 - protein, 644 aa, synthetic construct
  REGION 1..644: note = Synthetic
MDMRVPAQLLGLLLLWLRGARCQVQLVQSGAEVKKPGASVKVSCKASGYTFTGYYMHWVRQAPGQGLEWMGWFKPNSGVTNYAQKFQGRVTMSRDTSISTAYMELSSLRSDDTAVYYCARAGYSTSWKDWFDPWGQGTLVTVSSASTKGPSVFPLAPSSKSTSGGTAALGCLVKDYFPEPVTVSWNSGALTSGVHTFPAVLQSSGLYSLSSVVTVPSSSLGTQTYICNVNHKPSNTKVDKKVEPKSCDKTHTCPPCPAPELLGGPSVFLFPPKPKDTLMISRTPEVTCVVVDVSHEDPEVKFNWYVDGVEVHNAKTKPCEEQYGSTYRCVSVLTVLHQDWLNGKEYKCKVSNKALPAPIEKTISKAKGQPREPQVYTLPPSRKEMTKNQVSLTCLVKGFYPSDIAVEWESNGQPENNYKTTPPVLKSDGSFFLYSKLTVDKSRWQQGNVFSCSVMHEALHNHYTQKSLSLSPGGGGGSSPGQGTQSENSCTHFPGNLPNMLRDLLDAFSRVKTFFQMKDQLDNLLLKESLLEDFKGYLGCQALSEMIQFYLEEVMPQAENQDPDIKAHVNSLGENLKTLRLRLRRCHRFLPCENGGGSGGKSKAVEQVKNAFNKLQEKGIYKAMSEFDIFINYIEAYMTMKIRN

SEQ ID NO: 1304 - protein, 236 aa, synthetic construct; identical to SEQ ID NO: 25
  REGION 1..236: note = Synthetic

SEQ ID NO: 1305 - protein, 419 aa, synthetic construct; identical to SEQ ID NO: 1089
  REGION 1..419: note = Synthetic

SEQ ID NO: 1306 - protein, 644 aa, synthetic construct
  REGION 1..644: note = Synthetic
MDMRVPAQLLGLLLLWLRGARCQVQLVQSGAEVKKPGASVKVSCKASGYTFTGYYMHWVRQAPGQGLEWMGWFKPNSGVTNYAQKFQGRVTMSRDTSISTAYMELSSLRSDDTAVYYCARAGYSTSWKDWFDPWGQGTLVTVSSASTKGPSVFPLAPSSKSTSGGTAALGCLVKDYFPEPVTVSWNSGALTSGVHTFPAVLQSSGLYSLSSVVTVPSSSLGTQTYICNVNHKPSNTKVDKKVEPKSCDKTHTCPPCPAPELLGGPSVFLFPPKPKDTLMISRTPEVTCVVVDVSHEDPEVKFNWYVDGVEVHNAKTKPCEEQYGSTYRCVSVLTVLHQDWLNGKEYKCKVSNKALPAPIEKTISKAKGQPREPQVYTLPPSRKEMTKNQVSLTCLVKGFYPSDIAVEWESNGQPENNYKTTPPVLKSDGSFFLYSKLTVDKSRWQQGNVFSCSVMHEALHNHYTQKSLSLSPGGGGGSSPGQGTQSENSCTHFPGNLPNMLRDLRDAFSRVKTFFQMKDQLDNLLLKESLLEDFKGYLGCQALSEMIQFYLEEVMPQAENQDPDIKAHVNSLGENLKTLRLRLRRCHRFLPCENGGGSGGKSKAVEQVKNAFNKLQEKGIYLAMSEFDIFINYIEAYMTMKIRN

SEQ ID NO: 1307 - protein, 236 aa, synthetic construct; identical to SEQ ID NO: 25
  REGION 1..236: note = Synthetic

SEQ ID NO: 1308 - protein, 419 aa, synthetic construct; identical to SEQ ID NO: 1092
  REGION 1..419: note = Synthetic

SEQ ID NO: 1309 - protein, 644 aa, synthetic construct
  REGION 1..644: note = Synthetic
MDMRVPAQLLGLLLLWLRGARCQVQLVQSGAEVKKPGASVKVSCKASGYTFTGYYMHWVRQAPGQGLEWMGWFKPNSGVTNYAQKFQGRVTMSRDTSISTAYMELSSLRSDDTAVYYCARAGYSTSWKDWFDPWGQGTLVTVSSASTKGPSVFPLAPSSKSTSGGTAALGCLVKDYFPEPVTVSWNSGALTSGVHTFPAVLQSSGLYSLSSVVTVPSSSLGTQTYICNVNHKPSNTKVDKKVEPKSCDKTHTCPPCPAPELLGGPSVFLFPPKPKDTLMISRTPEVTCVVVDVSHEDPEVKFNWYVDGVEVHNAKTKPCEEQYGSTYRCVSVLTVLHQDWLNGKEYKCKVSNKALPAPIEKTISKAKGQPREPQVYTLPPSRKEMTKNQVSLTCLVKGFYPSDIAVEWESNGQPENNYKTTPPVLKSDGSFFLYSKLTVDKSRWQQGNVFSCSVMHEALHNHYTQKSLSLSPGGGGGSSPGQGTQSENSCTHFPGNLPNMLRDLRDAFSRVKTFFQMKDQLDNLLLKESLLEDFKGYLGCQALSEMIQFYLEEVMPQAENQDPDIKAHVNSLGENLKTLRLRLRRCHRFLPCENGGGSGGKSKAVEQVKNAFNKLQEKGIYDAMSEFDIFINYIEAYMTMKIRN

SEQ ID NO: 1310 - protein, 236 aa, synthetic construct; identical to SEQ ID NO: 25
  REGION 1..236: note = Synthetic

SEQ ID NO: 1311 - protein, 419 aa, synthetic construct; identical to SEQ ID NO: 1095
  REGION 1..419: note = Synthetic

SEQ ID NO: 1312 - protein, 644 aa, synthetic construct
  REGION 1..644: note = Synthetic
MDMRVPAQLLGLLLLWLRGARCQVQLVQSGAEVKKPGASVKVSCKASGYTFTGYYMHWVRQAPGQGLEWMGWFKPNSGVTNYAQKFQGRVTMSRDTSISTAYMELSSLRSDDTAVYYCARAGYSTSWKDWFDPWGQGTLVTVSSASTKGPSVFPLAPSSKSTSGGTAALGCLVKDYFPEPVTVSWNSGALTSGVHTFPAVLQSSGLYSLSSVVTVPSSSLGTQTYICNVNHKPSNTKVDKKVEPKSCDKTHTCPPCPAPELLGGPSVFLFPPKPKDTLMISRTPEVTCVVVDVSHEDPEVKFNWYVDGVEVHNAKTKPCEEQYGSTYRCVSVLTVLHQDWLNGKEYKCKVSNKALPAPIEKTISKAKGQPREPQVYTLPPSRKEMTKNQVSLTCLVKGFYPSDIAVEWESNGQPENNYKTTPPVLKSDGSFFLYSKLTVDKSRWQQGNVFSCSVMHEALHNHYTQKSLSLSPGGGGGSSPGQGTQSENSCTHFPGNLPNMLRDLRDAFSRVKTFFQMKGQLDNLLLKESLLEDFKGYLGCQALSEMIQFYLEEVMPQAENQDPDIKAHVNSLGENLKTLRLRLRRCHRFLPCENGGGSGGKSKAVEQVKNAFNKLQEKGIYKAMSEFDIFINYIEAYMTMKIRN

SEQ ID NO: 1313 - protein, 236 aa, synthetic construct; identical to SEQ ID NO: 25
  REGION 1..236: note = Synthetic

SEQ ID NO: 1314 - protein, 419 aa, synthetic construct; identical to SEQ ID NO: 1098
  REGION 1..419: note = Synthetic

SEQ ID NO: 1315 - protein, 644 aa, synthetic construct
  REGION 1..644: note = Synthetic
MDMRVPAQLLGLLLLWLRGARCQVQLVQSGAEVKKPGASVKVSCKASGYTFTGYYMHWVRQAPGQGLEWMGWFKPNSGVTNYAQKFQGRVTMSRDTSISTAYMELSSLRSDDTAVYYCARAGYSTSWKDWFDPWGQGTLVTVSSASTKGPSVFPLAPSSKSTSGGTAALGCLVKDYFPEPVTVSWNSGALTSGVHTFPAVLQSSGLYSLSSVVTVPSSSLGTQTYICNVNHKPSNTKVDKKVEPKSCDKTHTCPPCPAPELLGGPSVFLFPPKPKDTLMISRTPEVTCVVVDVSHEDPEVKFNWYVDGVEVHNAKTKPCEEQYGSTYRCVSVLTVLHQDWLNGKEYKCKVSNKALPAPIEKTISKAKGQPREPQVYTLPPSRKEMTKNQVSLTCLVKGFYPSDIAVEWESNGQPENNYKTTPPVLKSDGSFFLYSKLTVDKSRWQQGNVFSCSVMHEALHNHYTQKSLSLSPGGGGGSSPGQGTQSENSCTHFPGNLPNMLRDLRDAFSRVKTFFRMKDQLDNLLLKESLLEDFKGYLGCQALSEMIQFYLEEVMPQAENQDPDIKAHVNSLGENLKTLRLRLRRCHRFLPCENGGGSGGKSKAVEQVKNAFNKLQEKGIYKAMSEFDIFINYIEAYMTMKIRN

SEQ ID NO: 1316 - protein, 236 aa, synthetic construct; identical to SEQ ID NO: 25
  REGION 1..236: note = Synthetic

SEQ ID NO: 1317 - protein, 419 aa, synthetic construct; identical to SEQ ID NO: 1101
  REGION 1..419: note = Synthetic

SEQ ID NO: 1318 - protein, 644 aa, synthetic construct
  REGION 1..644: note = Synthetic
MDMRVPAQLLGLLLLWLRGARCQVQLVQSGAEVKKPGASVKVSCKASGYTFTGYYMHWVRQAPGQGLEWMGWFKPNSGVTNYAQKFQGRVTMSRDTSISTAYMELSSLRSDDTAVYYCARAGYSTSWKDWFDPWGQGTLVTVSSASTKGPSVFPLAPSSKSTSGGTAALGCLVKDYFPEPVTVSWNSGALTSGVHTFPAVLQSSGLYSLSSVVTVPSSSLGTQTYICNVNHKPSNTKVDKKVEPKSCDKTHTCPPCPAPELLGGPSVFLFPPKPKDTLMISRTPEVTCVVVDVSHEDPEVKFNWYVDGVEVHNAKTKPCEEQYGSTYRCVSVLTVLHQDWLNGKEYKCKVSNKALPAPIEKTISKAKGQPREPQVYTLPPSRKEMTKNQVSLTCLVKGFYPSDIAVEWESNGQPENNYKTTPPVLKSDGSFFLYSKLTVDKSRWQQGNVFSCSVMHEALHNHYTQKSLSLSPGGGGGSSPGQGTQSENSCTHFPGNLPNMLRDLRDAFSRVKTFFQMKDQLDNKLLKESLLEDFKGYLGCQALSEMIQFYLEEVMPQAENQDPDIKAHVNSLGENLKTLRLRLRRCHRFLPCENGGGSGGKSKAVEQVKNAFNKLQEKGIYKAMSEFDIFINYIEAYMTMKIRN

SEQ ID NO: 1319 - protein, 236 aa, synthetic construct; identical to SEQ ID NO: 25
  REGION 1..236: note = Synthetic

SEQ ID NO: 1320 - protein, 419 aa, synthetic construct; identical to SEQ ID NO: 1104
  REGION 1..419: note = Synthetic

SEQ ID NO: 1321 - protein, 644 aa, synthetic construct
  REGION 1..644: note = Synthetic
MDMRVPAQLLGLLLLWLRGARCQVQLVQSGAEVKKPGASVKVSCKASGYTFTGYYMHWVRQAPGQGLEWMGWFKPNSGVTNYAQKFQGRVTMSRDTSISTAYMELSSLRSDDTAVYYCARAGYSTSWKDWFDPWGQGTLVTVSSASTKGPSVFPLAPSSKSTSGGTAALGCLVKDYFPEPVTVSWNSGALTSGVHTFPAVLQSSGLYSLSSVVTVPSSSLGTQTYICNVNHKPSNTKVDKKVEPKSCDKTHTCPPCPAPELLGGPSVFLFPPKPKDTLMISRTPEVTCVVVDVSHEDPEVKFNWYVDGVEVHNAKTKPCEEQYGSTYRCVSVLTVLHQDWLNGKEYKCKVSNKALPAPIEKTISKAKGQPREPQVYTLPPSRKEMTKNQVSLTCLVKGFYPSDIAVEWESNGQPENNYKTTPPVLKSDGSFFLYSKLTVDKSRWQQGNVFSCSVMHEALHNHYTQKSLSLSPGGGGGSSPGQGTQSENSCTHFPGNLPNMLRDLRDAFSRVDTFFQMKDQLDNLLLKESLLEDFKGYLGCQALSEMIQFYLEEVMPQAENQDPDIKAHVNSLGENLKTLRLRLRRCHRFLPCENGGGSGGKSKAVEQVKNAFNKLQEKGIYKAMSEFDIFINYIEAYMTMKIRN

SEQ ID NO: 1322 - protein, 236 aa, synthetic construct; identical to SEQ ID NO: 25
  REGION 1..236: note = Synthetic

SEQ ID NO: 1323 - protein, 419 aa, synthetic construct; identical to SEQ ID NO: 1107
  REGION 1..419: note = Synthetic

SEQ ID NO: 1324 - protein, 644 aa, synthetic construct
  REGION 1..644: note = Synthetic
MDMRVPAQLLGLLLLWLRGARCQVQLVQSGAEVKKPGASVKVSCKASGYTFTGYYMHWVRQAPGQGLEWMGWFKPNSGVTNYAQKFQGRVTMSRDTSISTAYMELSSLRSDDTAVYYCARAGYSTSWKDWFDPWGQGTLVTVSSASTKGPSVFPLAPSSKSTSGGTAALGCLVKDYFPEPVTVSWNSGALTSGVHTFPAVLQSSGLYSLSSVVTVPSSSLGTQTYICNVNHKPSNTKVDKKVEPKSCDKTHTCPPCPAPELLGGPSVFLFPPKPKDTLMISRTPEVTCVVVDVSHEDPEVKFNWYVDGVEVHNAKTKPCEEQYGSTYRCVSVLTVLHQDWLNGKEYKCKVSNKALPAPIEKTISKAKGQPREPQVYTLPPSRKEMTKNQVSLTCLVKGFYPSDIAVEWESNGQPENNYKTTPPVLKSDGSFFLYSKLTVDKSRWQQGNVFSCSVMHEALHNHYTQKSLSLSPGGGGGSSPGQGTQSENSCTHFPGNLPNMLRDLRDAFSRVKTFFEMKDQLDNLLLKESLLEDFKGYLGCQALSEMIQFYLEEVMPQAENQDPDIKAHVNSLGENLKTLRLRLRRCHRFLPCENGGGSGGKSKAVEQVKNAFNKLQEKGIYKAMSEFDIFINYIEAYMTMKIRN

SEQ ID NO: 1325 - protein, 236 aa, synthetic construct; identical to SEQ ID NO: 25
  REGION 1..236: note = Synthetic

SEQ ID NO: 1326 - protein, 419 aa, synthetic construct; identical to SEQ ID NO: 1110
  REGION 1..419: note = Synthetic

SEQ ID NO: 1327 - protein, 643 aa, synthetic construct
  REGION 1..643: note = Synthetic
MDMRVPAQLLGLLLLWLRGARCQVQLVQSGAEVKKPGASVKVSCKASGYTFNGYYIHWVRQAPGQGLEWMGWLNPNSGGANYAQKFQGWVTMTRDTSISTAYMELSRLTSDDTAVYYCARDQRKTTVTPFEYWGQGTLVTVSSASTKGPSVFPLAPSSKSTSGGTAALGCLVKDYFPEPVTVSWNSGALTSGVHTFPAVLQSSGLYSLSSVVTVPSSSLGTQTYICNVNHKPSNTKVDKKVEPKSCDKTHTCPPCPAPELLGGPSVFLFPPKPKDTLMISRTPEVTCVVVDVSHEDPEVKFNWYVDGVEVHNAKTKPCEEQYGSTYRCVSVLTVLHQDWLNGKEYKCKVSNKALPAPIEKTISKAKGQPREPQVYTLPPSRKEMTKNQVSLTCLVKGFYPSDIAVEWESNGQPENNYKTTPPVLKSDGSFFLYSKLTVDKSRWQQGNVFSCSVMHEALHNHYTQKSLSLSPGGGGGSSPGQGTQSENSCTHFPGNLPNMLRDLLDAFSRVKTFFQMKDQLDNLLLKESLLEDFKGYLGCQALSEMIQFYLEEVMPQAENQDPDIKAHVNSLGENLKTLRLRLRRCHRFLPCENGGGSGGKSKAVEQVKNAFNKLQEKGIYKAMSEFDIFINYIEAYMTMKIRN

SEQ ID NO: 1328 - protein, 230 aa, synthetic construct; identical to SEQ ID NO: 1024
  REGION 1..230: note = Synthetic

SEQ ID NO: 1329 - protein, 419 aa, synthetic construct; identical to SEQ ID NO: 1089
  REGION 1..419: note = Synthetic

SEQ ID NO: 1330 - protein, 643 aa, synthetic construct
  REGION 1..643: note = Synthetic
MDMRVPAQLLGLLLLWLRGARCQVQLVQSGAEVKKPGASVKVSCKASGYTFNGYYIHWVRQAPGQGLEWMGWLNPNSGGANYAQKFQGWVTMTRDTSISTAYMELSRLTSDDTAVYYCARDQRKTTVTPFEYWGQGTLVTVSSASTKGPSVFPLAPSSKSTSGGTAALGCLVKDYFPEPVTVSWNSGALTSGVHTFPAVLQSSGLYSLSSVVTVPSSSLGTQTYICNVNHKPSNTKVDKKVEPKSCDKTHTCPPCPAPELLGGPSVFLFPPKPKDTLMISRTPEVTCVVVDVSHEDPEVKFNWYVDGVEVHNAKTKPCEEQYGSTYRCVSVLTVLHQDWLNGKEYKCKVSNKALPAPIEKTISKAKGQPREPQVYTLPPSRKEMTKNQVSLTCLVKGFYPSDIAVEWESNGQPENNYKTTPPVLKSDGSFFLYSKLTVDKSRWQQGNVFSCSVMHEALHNHYTQKSLSLSPGGGGGSSPGQGTQSENSCTHFPGNLPNMLRDLRDAFSRVKTFFQMKDQLDNLLLKESLLEDFKGYLGCQALSEMIQFYLEEVMPQAENQDPDIKAHVNSLGENLKTLRLRLRRCHRFLPCENGGGSGGKSKAVEQVKNAFNKLQEKGIYLAMSEFDIFINYIEAYMTMKIRN

SEQ ID NO: 1331 - protein, 230 aa, synthetic construct; identical to SEQ ID NO: 1024
  REGION 1..230: note = Synthetic

SEQ ID NO: 1332 - protein, 419 aa, synthetic construct; identical to SEQ ID NO: 1092
  REGION 1..419: note = Synthetic

SEQ ID NO: 1333 - protein, 643 aa, synthetic construct
  REGION 1..643: note = Synthetic
MDMRVPAQLLGLLLLWLRGARCQVQLVQSGAEVKKPGASVKVSCKASGYTFNGYYIHWVRQAPGQGLEWMGWLNPNSGGANYAQKFQGWVTMTRDTSISTAYMELSRLTSDDTAVYYCARDQRKTTVTPFEYWGQGTLVTVSSASTKGPSVFPLAPSSKSTSGGTAALGCLVKDYFPEPVTVSWNSGALTSGVHTFPAVLQSSGLYSLSSVVTVPSSSLGTQTYICNVNHKPSNTKVDKKVEPKSCDKTHTCPPCPAPELLGGPSVFLFPPKPKDTLMISRTPEVTCVVVDVSHEDPEVKFNWYVDGVEVHNAKTKPCEEQYGSTYRCVSVLTVLHQDWLNGKEYKCKVSNKALPAPIEKTISKAKGQPREPQVYTLPPSRKEMTKNQVSLTCLVKGFYPSDIAVEWESNGQPENNYKTTPPVLKSDGSFFLYSKLTVDKSRWQQGNVFSCSVMHEALHNHYTQKSLSLSPGGGGGSSPGQGTQSENSCTHFPGNLPNMLRDLRDAFSRVKTFFQMKDQLDNLLLKESLLEDFKGYLGCQALSEMIQFYLEEVMPQAENQDPDIKAHVNSLGENLKTLRLRLRRCHRFLPCENGGGSGGKSKAVEQVKNAFNKLQEKGIYDAMSEFDIFINYIEAYMTMKIRN

SEQ ID NO: 1334 - protein, 230 aa, synthetic construct; identical to SEQ ID NO: 1024
  REGION 1..230: note = Synthetic

SEQ ID NO: 1335 - protein, 419 aa, synthetic construct; identical to SEQ ID NO: 1095
  REGION 1..419: note = Synthetic

SEQ ID NO: 1336 - protein, 643 aa, synthetic construct
  REGION 1..643: note = Synthetic
MDMRVPAQLLGLLLLWLRGARCQVQLVQSGAEVKKPGASVKVSCKASGYTFNGYYIHWVRQAPGQGLEWMGWLNPNSGGANYAQKFQGWVTMTRDTSISTAYMELSRLTSDDTAVYYCARDQRKTTVTPFEYWGQGTLVTVSSASTKGPSVFPLAPSSKSTSGGTAALGCLVKDYFPEPVTVSWNSGALTSGVHTFPAVLQSSGLYSLSSVVTVPSSSLGTQTYICNVNHKPSNTKVDKKVEPKSCDKTHTCPPCPAPELLGGPSVFLFPPKPKDTLMISRTPEVTCVVVDVSHEDPEVKFNWYVDGVEVHNAKTKPCEEQYGSTYRCVSVLTVLHQDWLNGKEYKCKVSNKALPAPIEKTISKAKGQPREPQVYTLPPSRKEMTKNQVSLTCLVKGFYPSDIAVEWESNGQPENNYKTTPPVLKSDGSFFLYSKLTVDKSRWQQGNVFSCSVMHEALHNHYTQKSLSLSPGGGGGSSPGQGTQSENSCTHFPGNLPNMLRDLRDAFSRVKTFFQMKGQLDNLLLKESLLEDFKGYLGCQALSEMIQFYLEEVMPQAENQDPDIKAHVNSLGENLKTLRLRLRRCHRFLPCENGGGSGGKSKAVEQVKNAFNKLQEKGIYKAMSEFDIFINYIEAYMTMKIRN

SEQ ID NO: 1337 - protein, 230 aa, synthetic construct; identical to SEQ ID NO: 1024
  REGION 1..230: note = Synthetic

SEQ ID NO: 1338 - protein, 419 aa, synthetic construct; identical to SEQ ID NO: 1098
  REGION 1..419: note = Synthetic

SEQ ID NO: 1339 - protein, 643 aa, synthetic construct
  REGION 1..643: note = Synthetic
MDMRVPAQLLGLLLLWLRGARCQVQLVQSGAEVKKPGASVKVSCKASGYTFNGYYIHWVRQAPGQGLEWMGWLNPNSGGANYAQKFQGWVTMTRDTSISTAYMELSRLTSDDTAVYYCARDQRKTTVTPFEYWGQGTLVTVSSASTKGPSVFPLAPSSKSTSGGTAALGCLVKDYFPEPVTVSWNSGALTSGVHTFPAVLQSSGLYSLSSVVTVPSSSLGTQTYICNVNHKPSNTKVDKKVEPKSCDKTHTCPPCPAPELLGGPSVFLFPPKPKDTLMISRTPEVTCVVVDVSHEDPEVKFNWYVDGVEVHNAKTKPCEEQYGSTYRCVSVLTVLHQDWLNGKEYKCKVSNKALPAPIEKTISKAKGQPREPQVYTLPPSRKEMTKNQVSLTCLVKGFYPSDIAVEWESNGQPENNYKTTPPVLKSDGSFFLYSKLTVDKSRWQQGNVFSCSVMHEALHNHYTQKSLSLSPGGGGGSSPGQGTQSENSCTHFPGNLPNMLRDLRDAFSRVKTFFRMKDQLDNLLLKESLLEDFKGYLGCQALSEMIQFYLEEVMPQAENQDPDIKAHVNSLGENLKTLRLRLRRCHRFLPCENGGGSGGKSKAVEQVKNAFNKLQEKGIYKAMSEFDIFINYIEAYMTMKIRN

SEQ ID NO: 1340 - protein, 230 aa, synthetic construct; identical to SEQ ID NO: 1024
  REGION 1..230: note = Synthetic

SEQ ID NO: 1341 - protein, 419 aa, synthetic construct; identical to SEQ ID NO: 1101
  REGION 1..419: note = Synthetic

SEQ ID NO: 1342 - protein, 643 aa, synthetic construct
  REGION 1..643: note = Synthetic
MDMRVPAQLLGLLLLWLRGARCQVQLVQSGAEVKKPGASVKVSCKASGYTFNGYYIHWVRQAPGQGLEWMGWLNPNSGGANYAQKFQGWVTMTRDTSISTAYMELSRLTSDDTAVYYCARDQRKTTVTPFEYWGQGTLVTVSSASTKGPSVFPLAPSSKSTSGGTAALGCLVKDYFPEPVTVSWNSGALTSGVHTFPAVLQSSGLYSLSSVVTVPSSSLGTQTYICNVNHKPSNTKVDKKVEPKSCDKTHTCPPCPAPELLGGPSVFLFPPKPKDTLMISRTPEVTCVVVDVSHEDPEVKFNWYVDGVEVHNAKTKPCEEQYGSTYRCVSVLTVLHQDWLNGKEYKCKVSNKALPAPIEKTISKAKGQPREPQVYTLPPSRKEMTKNQVSLTCLVKGFYPSDIAVEWESNGQPENNYKTTPPVLKSDGSFFLYSKLTVDKSRWQQGNVFSCSVMHEALHNHYTQKSLSLSPGGGGGSSPGQGTQSENSCTHFPGNLPNMLRDLRDAFSRVKTFFQMKDQLDNKLLKESLLEDFKGYLGCQALSEMIQFYLEEVMPQAENQDPDIKAHVNSLGENLKTLRLRLRRCHRFLPCENGGGSGGKSKAVEQVKNAFNKLQEKGIYKAMSEFDIFINYIEAYMTMKIRN

SEQ ID NO: 1343 - protein, 230 aa, synthetic construct; identical to SEQ ID NO: 1024
  REGION 1..230: note = Synthetic

SEQ ID NO: 1344 - protein, 419 aa, synthetic construct; identical to SEQ ID NO: 1104
  REGION 1..419: note = Synthetic

SEQ ID NO: 1345 - protein, 643 aa, synthetic construct
  REGION 1..643: note = Synthetic
MDMRVPAQLLGLLLLWLRGARCQVQLVQSGAEVKKPGASVKVSCKASGYTFNGYYIHWVRQAPGQGLEWMGWLNPNSGGANYAQKFQGWVTMTRDTSISTAYMELSRLTSDDTAVYYCARDQRKTTVTPFEYWGQGTLVTVSSASTKGPSVFPLAPSSKSTSGGTAALGCLVKDYFPEPVTVSWNSGALTSGVHTFPAVLQSSGLYSLSSVVTVPSSSLGTQTYICNVNHKPSNTKVDKKVEPKSCDKTHTCPPCPAPELLGGPSVFLFPPKPKDTLMISRTPEVTCVVVDVSHEDPEVKFNWYVDGVEVHNAKTKPCEEQYGSTYRCVSVLTVLHQDWLNGKEYKCKVSNKALPAPIEKTISKAKGQPREPQVYTLPPSRKEMTKNQVSLTCLVKGFYPSDIAVEWESNGQPENNYKTTPPVLKSDGSFFLYSKLTVDKSRWQQGNVFSCSVMHEALHNHYTQKSLSLSPGGGGGSSPGQGTQSENSCTHFPGNLPNMLRDLRDAFSRVDTFFQMKDQLDNLLLKESLLEDFKGYLGCQALSEMIQFYLEEVMPQAENQDPDIKAHVNSLGENLKTLRLRLRRCHRFLPCENGGGSGGKSKAVEQVKNAFNKLQEKGIYKAMSEFDIFINYIEAYMTMKIRN

SEQ ID NO: 1346 - protein, 230 aa, synthetic construct; identical to SEQ ID NO: 1024
  REGION 1..230: note = Synthetic

SEQ ID NO: 1347 - protein, 419 aa, synthetic construct; identical to SEQ ID NO: 1107
  REGION 1..419: note = Synthetic

SEQ ID NO: 1348 - protein, 643 aa, synthetic construct
  REGION 1..643: note = Synthetic
MDMRVPAQLLGLLLLWLRGARCQVQLVQSGAEVKKPGASVKVSCKASGYTFNGYYIHWVRQAPGQGLEWMGWLNPNSGGANYAQKFQGWVTMTRDTSISTAYMELSRLTSDDTAVYYCARDQRKTTVTPFEYWGQGTLVTVSSASTKGPSVFPLAPSSKSTSGGTAALGCLVKDYFPEPVTVSWNSGALTSGVHTFPAVLQSSGLYSLSSVVTVPSSSLGTQTYICNVNHKPSNTKVDKKVEPKSCDKTHTCPPCPAPELLGGPSVFLFPPKPKDTLMISRTPEVTCVVVDVSHEDPEVKFNWYVDGVEVHNAKTKPCEEQYGSTYRCVSVLTVLHQDWLNGKEYKCKVSNKALPAPIEKTISKAKGQPREPQVYTLPPSRKEMTKNQVSLTCLVKGFYPSDIAVEWESNGQPENNYKTTPPVLKSDGSFFLYSKLTVDKSRWQQGNVFSCSVMHEALHNHYTQKSLSLSPGGGGGSSPGQGTQSENSCTHFPGNLPNMLRDLRDAFSRVKTFFEMKDQLDNLLLKESLLEDFKGYLGCQALSEMIQFYLEEVMPQAENQDPDIKAHVNSLGENLKTLRLRLRRCHRFLPCENGGGSGGKSKAVEQVKNAFNKLQEKGIYKAMSEFDIFINYIEAYMTMKIRN

SEQ ID NO: 1349 - protein, 230 aa, synthetic construct; identical to SEQ ID NO: 1024
  REGION 1..230: note = Synthetic

SEQ ID NO: 1350 - protein, 419 aa, synthetic construct; identical to SEQ ID NO: 1110
  REGION 1..419: note = Synthetic

SEQ ID NO: 1351 - protein, 644 aa, synthetic construct
  REGION 1..644: note = Synthetic
MDMRVPAQLLGLLLLWLRGARCQVQLVQSGAEVTKPGASVKVSCKASGYTFTRYDINWVRQATGQGLEWMGWMNPNSGNSGSVQKFRGRVTMTRDTSITTVYMELSSLRSDDTAVYYCARGGISSSWHWAFDIWGQGTMVTVSSASTKGPSVFPLAPSSKSTSGGTAALGCLVKDYFPEPVTVSWNSGALTSGVHTFPAVLQSSGLYSLSSVVTVPSSSLGTQTYICNVNHKPSNTKVDKKVEPKSCDKTHTCPPCPAPELLGGPSVFLFPPKPKDTLMISRTPEVTCVVVDVSHEDPEVKFNWYVDGVEVHNAKTKPCEEQYGSTYRCVSVLTVLHQDWLNGKEYKCKVSNKALPAPIEKTISKAKGQPREPQVYTLPPSRKEMTKNQVSLTCLVKGFYPSDIAVEWESNGQPENNYKTTPPVLKSDGSFFLYSKLTVDKSRWQQGNVFSCSVMHEALHNHYTQKSLSLSPGGGGGSSPGQGTQSENSCTHFPGNLPNMLRDLLDAFSRVKTFFQMKDQLDNLLLKESLLEDFKGYLGCQALSEMIQFYLEEVMPQAENQDPDIKAHVNSLGENLKTLRLRLRRCHRFLPCENGGGSGGKSKAVEQVKNAFNKLQEKGIYKAMSEFDIFINYIEAYMTMKIRN

SEQ ID NO: 1352 - protein, 236 aa, synthetic construct; identical to SEQ ID NO: 105
  REGION 1..236: note = Synthetic

SEQ ID NO: 1353 - protein, 419 aa, synthetic construct; identical to SEQ ID NO: 1089
  REGION 1..419: note = Synthetic

SEQ ID NO: 1354 - protein, 644 aa, synthetic construct
  REGION 1..644: note = Synthetic
MDMRVPAQLLGLLLLWLRGARCQVQLVQSGAEVTKPGASVKVSCKASGYTFTRYDINWVRQATGQGLEWMGWMNPNSGNSGSVQKFRGRVTMTRDTSITTVYMELSSLRSDDTAVYYCARGGISSSWHWAFDIWGQGTMVTVSSASTKGPSVFPLAPSSKSTSGGTAALGCLVKDYFPEPVTVSWNSGALTSGVHTFPAVLQSSGLYSLSSVVTVPSSSLGTQTYICNVNHKPSNTKVDKKVEPKSCDKTHTCPPCPAPELLGGPSVFLFPPKPKDTLMISRTPEVTCVVVDVSHEDPEVKFNWYVDGVEVHNAKTKPCEEQYGSTYRCVSVLTVLHQDWLNGKEYKCKVSNKALPAPIEKTISKAKGQPREPQVYTLPPSRKEMTKNQVSLTCLVKGFYPSDIAVEWESNGQPENNYKTTPPVLKSDGSFFLYSKLTVDKSRWQQGNVFSCSVMHEALHNHYTQKSLSLSPGGGGGSSPGQGTQSENSCTHFPGNLPNMLRDLRDAFSRVKTFFQMKDQLDNLLLKESLLEDFKGYLGCQALSEMIQFYLEEVMPQAENQDPDIKAHVNSLGENLKTLRLRLRRCHRFLPCENGGGSGGKSKAVEQVKNAFNKLQEKGIYLAMSEFDIFINYIEAYMTMKIRN

SEQ ID NO: 1355 - protein, 236 aa, synthetic construct; identical to SEQ ID NO: 105
  REGION 1..236: note = Synthetic

SEQ ID NO: 1356 - protein, 419 aa, synthetic construct; identical to SEQ ID NO: 1092
  REGION 1..419: note = Synthetic

SEQ ID NO: 1357 - protein, 644 aa, synthetic construct
  REGION 1..644: note = Synthetic
MDMRVPAQLLGLLLLWLRGARCQVQLVQSGAEVTKPGASVKVSCKASGYTFTRYDINWVRQATGQGLEWMGWMNPNSGNSGSVQKFRGRVTMTRDTSITTVYMELSSLRSDDTAVYYCARGGISSSWHWAFDIWGQGTMVTVSSASTKGPSVFPLAPSSKSTSGGTAALGCLVKDYFPEPVTVSWNSGALTSGVHTFPAVLQSSGLYSLSSVVTVPSSSLGTQTYICNVNHKPSNTKVDKKVEPKSCDKTHTCPPCPAPELLGGPSVFLFPPKPKDTLMISRTPEVTCVVVDVSHEDPEVKFNWYVDGVEVHNAKTKPCEEQYGSTYRCVSVLTVLHQDWLNGKEYKCKVSNKALPAPIEKTISKAKGQPREPQVYTLPPSRKEMTKNQVSLTCLVKGFYPSDIAVEWESNGQPENNYKTTPPVLKSDGSFFLYSKLTVDKSRWQQGNVFSCSVMHEALHNHYTQKSLSLSPGGGGGSSPGQGTQSENSCTHFPGNLPNMLRDLRDAFSRVKTFFQMKDQLDNLLLKESLLEDFKGYLGCQALSEMIQFYLEEVMPQAENQDPDIKAHVNSLGENLKTLRLRLRRCHRFLPCENGGGSGGKSKAVEQVKNAFNKLQEKGIYDAMSEFDIFINYIEAYMTMKIRN

SEQ ID NO: 1358 - protein, 236 aa, synthetic construct; identical to SEQ ID NO: 105
  REGION 1..236: note = Synthetic

SEQ ID NO: 1359 - protein, 419 aa, synthetic construct; identical to SEQ ID NO: 1095
  REGION 1..419: note = Synthetic

SEQ ID NO: 1360 - protein, 644 aa, synthetic construct
  REGION 1..644: note = Synthetic
MDMRVPAQLLGLLLLWLRGARCQVQLVQSGAEVTKPGASVKVSCKASGYTFTRYDINWVRQATGQGLEWMGWMNPNSGNSGSVQKFRGRVTMTRDTSITTVYMELSSLRSDDTAVYYCARGGISSSWHWAFDIWGQGTMVTVSSASTKGPSVFPLAPSSKSTSGGTAALGCLVKDYFPEPVTVSWNSGALTSGVHTFPAVLQSSGLYSLSSVVTVPSSSLGTQTYICNVNHKPSNTKVDKKVEPKSCDKTHTCPPCPAPELLGGPSVFLFPPKPKDTLMISRTPEVTCVVVDVSHEDPEVKFNWYVDGVEVHNAKTKPCEEQYGSTYRCVSVLTVLHQDWLNGKEYKCKVSNKALPAPIEKTISKAKGQPREPQVYTLPPSRKEMTKNQVSLTCLVKGFYPSDIAVEWESNGQPENNYKTTPPVLKSDGSFFLYSKLTVDKSRWQQGNVFSCSVMHEALHNHYTQKSLSLSPGGGGGSSPGQGTQSENSCTHFPGNLPNMLRDLRDAFSRVKTFFQMKGQLDNLLLKESLLEDFKGYLGCQALSEMIQFYLEEVMPQAENQDPDIKAHVNSLGENLKTLRLRLRRCHRFLPCENGGGSGGKSKAVEQVKNAFNKLQEKGIYKAMSEFDIFINYIEAYMTMKIRN

SEQ ID NO: 1361 - protein, 236 aa, synthetic construct; identical to SEQ ID NO: 105
  REGION 1..236: note = Synthetic

SEQ ID NO: 1362 - protein, 419 aa, synthetic construct; identical to SEQ ID NO: 1098
  REGION 1..419: note = Synthetic

SEQ ID NO: 1363 - protein, 644 aa, synthetic construct
  REGION 1..644: note = Synthetic
MDMRVPAQLLGLLLLWLRGARCQVQLVQSGAEVTKPGASVKVSCKASGYTFTRYDINWVRQATGQGLEWMGWMNPNSGNSGSVQKFRGRVTMTRDTSITTVYMELSSLRSDDTAVYYCARGGISSSWHWAFDIWGQGTMVTVSSASTKGPSVFPLAPSSKSTSGGTAALGCLVKDYFPEPVTVSWNSGALTSGVHTFPAVLQSSGLYSLSSVVTVPSSSLGTQTYICNVNHKPSNTKVDKKVEPKSCDKTHTCPPCPAPELLGGPSVFLFPPKPKDTLMISRTPEVTCVVVDVSHEDPEVKFNWYVDGVEVHNAKTKPCEEQYGSTYRCVSVLTVLHQDWLNGKEYKCKVSNKALPAPIEKTISKAKGQPREPQVYTLPPSRKEMTKNQVSLTCLVKGFYPSDIAVEWESNGQPENNYKTTPPVLKSDGSFFLYSKLTVDKSRWQQGNVFSCSVMHEALHNHYTQKSLSLSPGGGGGSSPGQGTQSENSCTHFPGNLPNMLRDLRDAFSRVKTFFRMKDQLDNLLLKESLLEDFKGYLGCQALSEMIQFYLEEVMPQAENQDPDIKAHVNSLGENLKTLRLRLRRCHRFLPCENGGGSGGKSKAVEQVKNAFNKLQEKGIYKAMSEFDIFINYIEAYMTMKIRN

SEQ ID NO: 1364 - protein, 236 aa, synthetic construct; identical to SEQ ID NO: 105
  REGION 1..236: note = Synthetic

SEQ ID NO: 1365 - protein, 419 aa, synthetic construct; identical to SEQ ID NO: 1101
  REGION 1..419: note = Synthetic

SEQ ID NO: 1366 - protein, 644 aa, synthetic construct
  REGION 1..644: note = Synthetic
MDMRVPAQLLGLLLLWLRGARCQVQLVQSGAEVTKPGASVKVSCKASGYTFTRYDINWVRQATGQGLEWMGWMNPNSGNSGSVQKFRGRVTMTRDTSITTVYMELSSLRSDDTAVYYCARGGISSSWHWAFDIWGQGTMVTVSSASTKGPSVFPLAPSSKSTSGGTAALGCLVKDYFPEPVTVSWNSGALTSGVHTFPAVLQSSGLYSLSSVVTVPSSSLGTQTYICNVNHKPSNTKVDKKVEPKSCDKTHTCPPCPAPELLGGPSVFLFPPKPKDTLMISRTPEVTCVVVDVSHEDPEVKFNWYVDGVEVHNAKTKPCEEQYGSTYRCVSVLTVLHQDWLNGKEYKCKVSNKALPAPIEKTISKAKGQPREPQVYTLPPSRKEMTKNQVSLTCLVKGFYPSDIAVEWESNGQPENNYKTTPPVLKSDGSFFLYSKLTVDKSRWQQGNVFSCSVMHEALHNHYTQKSLSLSPGGGGGSSPGQGTQSENSCTHFPGNLPNMLRDLRDAFSRVKTFFQMKDQLDNKLLKESLLEDFKGYLGCQALSEMIQFYLEEVMPQAENQDPDIKAHVNSLGENLKTLRLRLRRCHRFLPCENGGGSGGKSKAVEQVKNAFNKLQEKGIYKAMSEFDIFINYIEAYMTMKIRN

SEQ ID NO: 1367 - protein, 236 aa, synthetic construct; identical to SEQ ID NO: 105
  REGION 1..236: note = Synthetic

SEQ ID NO: 1368 - protein, 419 aa, synthetic construct; identical to SEQ ID NO: 1104
  REGION 1..419: note = Synthetic

SEQ ID NO: 1369 - protein, 644 aa, synthetic construct
  REGION 1..644: note = Synthetic
MDMRVPAQLLGLLLLWLRGARCQVQLVQSGAEVTKPGASVKVSCKASGYTFTRYDINWVRQATGQGLEWMGWMNPNSGNSGSVQKFRGRVTMTRDTSITTVYMELSSLRSDDTAVYYCARGGISSSWHWAFDIWGQGTMVTVSSASTKGPSVFPLAPSSKSTSGGTAALGCLVKDYFPEPVTVSWNSGALTSGVHTFPAVLQSSGLYSLSSVVTVPSSSLGTQTYICNVNHKPSNTKVDKKVEPKSCDKTHTCPPCPAPELLGGPSVFLFPPKPKDTLMISRTPEVTCVVVDVSHEDPEVKFNWYVDGVEVHNAKTKPCEEQYGSTYRCVSVLTVLHQDWLNGKEYKCKVSNKALPAPIEKTISKAKGQPREPQVYTLPPSRKEMTKNQVSLTCLVKGFYPSDIAVEWESNGQPENNYKTTPPVLKSDGSFFLYSKLTVDKSRWQQGNVFSCSVMHEALHNHYTQKSLSLSPGGGGGSSPGQGTQSENSCTHFPGNLPNMLRDLRDAFSRVDTFFQMKDQLDNLLLKESLLEDFKGYLGCQALSEMIQFYLEEVMPQAENQDPDIKAHVNSLGENLKTLRLRLRRCHRFLPCENGGGSGGKSKAVEQVKNAFNKLQEKGIYKAMSEFDIFINYIEAYMTMKIRN

SEQ ID NO: 1370 - protein, 236 aa, synthetic construct; identical to SEQ ID NO: 105
  REGION 1..236: note = Synthetic

SEQ ID NO: 1371 - protein, 419 aa, synthetic construct; identical to SEQ ID NO: 1107
  REGION 1..419: note = Synthetic

SEQ ID NO: 1372 - protein, 644 aa, synthetic construct
  REGION 1..644: note = Synthetic
MDMRVPAQLLGLLLLWLRGARCQVQLVQSGAEVTKPGASVKVSCKASGYTFTRYDINWVRQATGQGLEWMGWMNPNSGNSGSVQKFRGRVTMTRDTSITTVYMELSSLRSDDTAVYYCARGGISSSWHWAFDIWGQGTMVTVSSASTKGPSVFPLAPSSKSTSGGTAALGCLVKDYFPEPVTVSWNSGALTSGVHTFPAVLQSSGLYSLSSVVTVPSSSLGTQTYICNVNHKPSNTKVDKKVEPKSCDKTHTCPPCPAPELLGGPSVFLFPPKPKDTLMISRTPEVTCVVVDVSHEDPEVKFNWYVDGVEVHNAKTKPCEEQYGSTYRCVSVLTVLHQDWLNGKEYKCKVSNKALPAPIEKTISKAKGQPREPQVYTLPPSRKEMTKNQVSLTCLVKGFYPSDIAVEWESNGQPENNYKTTPPVLKSDGSFFLYSKLTVDKSRWQQGNVFSCSVMHEALHNHYTQKSLSLSPGGGGGSSPGQGTQSENSCTHFPGNLPNMLRDLRDAFSRVKTFFEMKDQLDNLLLKESLLEDFKGYLGCQALSEMIQFYLEEVMPQAENQDPDIKAHVNSLGENLKTLRLRLRRCHRFLPCENGGGSGGKSKAVEQVKNAFNKLQEKGIYKAMSEFDIFINYIEAYMTMKIRN

SEQ ID NO: 1373 - protein, 236 aa, synthetic construct; identical to SEQ ID NO: 105
  REGION 1..236: note = Synthetic

SEQ ID NO: 1374 - protein, 419 aa, synthetic construct; identical to SEQ ID NO: 1110
  REGION 1..419: note = Synthetic

SEQ ID NO: 1375 - protein, 641 aa, synthetic construct
  REGION 1..641: note = Synthetic
MDMRVPAQLLGLLLLWLRGARCEVQLLESGGGLVQPGGSLRLSCAASGFTFSSYAMTWVRQAPGRGLQWVSTISGSGSNTYYADSVKGRFTISRDNSKNTLYLQMSSLRAEDTAVYYCAKEGGSNRYFHHWGQGTLVTISSASTKGPSVFPLAPSSKSTSGGTAALGCLVKDYFPEPVTVSWNSGALTSGVHTFPAVLQSSGLYSLSSVVTVPSSSLGTQTYICNVNHKPSNTKVDKKVEPKSCDKTHTCPPCPAPELLGGPSVFLFPPKPKDTLMISRTPEVTCVVVDVSHEDPEVKFNWYVDGVEVHNAKTKPCEEQYGSTYRCVSVLTVLHQDWLNGKEYKCKVSNKALPAPIEKTISKAKGQPREPQVYTLPPSRKEMTKNQVSLTCLVKGFYPSDIAVEWESNGQPENNYKTTPPVLKSDGSFFLYSKLTVDKSRWQQGNVFSCSVMHEALHNHYTQKSLSLSPGGGGGSSPGQGTQSENSCTHFPGNLPNMLRDLLDAFSRVKTFFQMKDQLDNLLLKESLLEDFKGYLGCQALSEMIQFYLEEVMPQAENQDPDIKAHVNSLGENLKTLRLRLRRCHRFLPCENGGGSGGKSKAVEQVKNAFNKLQEKGIYKAMSEFDIFINYIEAYMTMKIRN

SEQ ID NO: 1376 - protein, 236 aa, synthetic construct; identical to SEQ ID NO: 1056
  REGION 1..236: note = Synthetic

SEQ ID NO: 1377 - protein, 419 aa, synthetic construct; identical to SEQ ID NO: 1089
  REGION 1..419: note = Synthetic

SEQ ID NO: 1378 - protein, 641 aa, synthetic construct
  REGION 1..641: note = Synthetic
MDMRVPAQLLGLLLLWLRGARCEVQLLESGGGLVQPGGSLRLSCAASGFTFSSYAMTWVRQAPGRGLQWVSTISGSGSNTYYADSVKGRFTISRDNSKNTLYLQMSSLRAEDTAVYYCAKEGGSNRYFHHWGQGTLVTISSASTKGPSVFPLAPSSKSTSGGTAALGCLVKDYFPEPVTVSWNSGALTSGVHTFPAVLQSSGLYSLSSVVTVPSSSLGTQTYICNVNHKPSNTKVDKKVEPKSCDKTHTCPPCPAPELLGGPSVFLFPPKPKDTLMISRTPEVTCVVVDVSHEDPEVKFNWYVDGVEVHNAKTKPCEEQYGSTYRCVSVLTVLHQDWLNGKEYKCKVSNKALPAPIEKTISKAKGQPREPQVYTLPPSRKEMTKNQVSLTCLVKGFYPSDIAVEWESNGQPENNYKTTPPVLKSDGSFFLYSKLTVDKSRWQQGNVFSCSVMHEALHNHYTQKSLSLSPGGGGGSSPGQGTQSENSCTHFPGNLPNMLRDLRDAFSRVKTFFQMKDQLDNLLLKESLLEDFKGYLGCQALSEMIQFYLEEVMPQAENQDPDIKAHVNSLGENLKTLRLRLRRCHRFLPCENGGGSGGKSKAVEQVKNAFNKLQEKGIYLAMSEFDIFINYIEAYMTMKIRN

SEQ ID NO: 1379 - protein, 236 aa, synthetic construct; identical to SEQ ID NO: 1056
  REGION 1..236: note = Synthetic

SEQ ID NO: 1380 - protein, 419 aa, synthetic construct; identical to SEQ ID NO: 1092
  REGION 1..419: note = Synthetic

SEQ ID NO: 1381 - protein, 641 aa, synthetic construct
  REGION 1..641: note = Synthetic
MDMRVPAQLLGLLLLWLRGARCEVQLLESGGGLVQPGGSLRLSCAASGFTFSSYAMTWVRQAPGRGLQWVSTISGSGSNTYYADSVKGRFTISRDNSKNTLYLQMSSLRAEDTAVYYCAKEGGSNRYFHHWGQGTLVTISSASTKGPSVFPLAPSSKSTSGGTAALGCLVKDYFPEPVTVSWNSGALTSGVHTFPAVLQSSGLYSLSSVVTVPSSSLGTQTYICNVNHKPSNTKVDKKVEPKSCDKTHTCPPCPAPELLGGPSVFLFPPKPKDTLMISRTPEVTCVVVDVSHEDPEVKFNWYVDGVEVHNAKTKPCEEQYGSTYRCVSVLTVLHQDWLNGKEYKCKVSNKALPAPIEKTISKAKGQPREPQVYTLPPSRKEMTKNQVSLTCLVKGFYPSDIAVEWESNGQPENNYKTTPPVLKSDGSFFLYSKLTVDKSRWQQGNVFSCSVMHEALHNHYTQKSLSLSPGGGGGSSPGQGTQSENSCTHFPGNLPNMLRDLRDAFSRVKTFFQMKDQLDNLLLKESLLEDFKGYLGCQALSEMIQFYLEEVMPQAENQDPDIKAHVNSLGENLKTLRLRLRRCHRFLPCENGGGSGGKSKAVEQVKNAFNKLQEKGIYDAMSEFDIFINYIEAYMTMKIRN

SEQ ID NO: 1382 - protein, 236 aa, synthetic construct; identical to SEQ ID NO: 1056
  REGION 1..236: note = Synthetic

SEQ ID NO: 1383 - protein, 419 aa, synthetic construct; identical to SEQ ID NO: 1095
  REGION 1..419: note = Synthetic

SEQ ID NO: 1384 - protein, 641 aa, synthetic construct
  REGION 1..641: note = Synthetic
MDMRVPAQLLGLLLLWLRGARCEVQLLESGGGLVQPGGSLRLSCAASGFTFSSYAMTWVRQAPGRGLQWVSTISGSGSNTYYADSVKGRFTISRDNSKNTLYLQMSSLRAEDTAVYYCAKEGGSNRYFHHWGQGTLVTISSASTKGPSVFPLAPSSKSTSGGTAALGCLVKDYFPEPVTVSWNSGALTSGVHTFPAVLQSSGLYSLSSVVTVPSSSLGTQTYICNVNHKPSNTKVDKKVEPKSCDKTHTCPPCPAPELLGGPSVFLFPPKPKDTLMISRTPEVTCVVVDVSHEDPEVKFNWYVDGVEVHNAKTKPCEEQYGSTYRCVSVLTVLHQDWLNGKEYKCKVSNKALPAPIEKTISKAKGQPREPQVYTLPPSRKEMTKNQVSLTCLVKGFYPSDIAVEWESNGQPENNYKTTPPVLKSDGSFFLYSKLTVDKSRWQQGNVFSCSVMHEALHNHYTQKSLSLSPGGGGGSSPGQGTQSENSCTHFPGNLPNMLRDLRDAFSRVKTFFQMKGQLDNLLLKESLLEDFKGYLGCQALSEMIQFYLEEVMPQAENQDPDIKAHVNSLGENLKTLRLRLRRCHRFLPCENGGGSGGKSKAVEQVKNAFNKLQEKGIYKAMSEFDIFINYIEAYMTMKIRN

SEQ ID NO: 1385 - protein, 236 aa, synthetic construct; identical to SEQ ID NO: 1056
  REGION 1..236: note = Synthetic

SEQ ID NO: 1386 - protein, 419 aa, synthetic construct; identical to SEQ ID NO: 1098
  REGION 1..419: note = Synthetic

SEQ ID NO: 1387 - protein, 641 aa, synthetic construct
  REGION 1..641: note = Synthetic
MDMRVPAQLLGLLLLWLRGARCEVQLLESGGGLVQPGGSLRLSCAASGFTFSSYAMTWVRQAPGRGLQWVSTISGSGSNTYYADSVKGRFTISRDNSKNTLYLQMSSLRAEDTAVYYCAKEGGSNRYFHHWGQGTLVTISSASTKGPSVFPLAPSSKSTSGGTAALGCLVKDYFPEPVTVSWNSGALTSGVHTFPAVLQSSGLYSLSSVVTVPSSSLGTQTYICNVNHKPSNTKVDKKVEPKSCDKTHTCPPCPAPELLGGPSVFLFPPKPKDTLMISRTPEVTCVVVDVSHEDPEVKFNWYVDGVEVHNAKTKPCEEQYGSTYRCVSVLTVLHQDWLNGKEYKCKVSNKALPAPIEKTISKAKGQPREPQVYTLPPSRKEMTKNQVSLTCLVKGFYPSDIAVEWESNGQPENNYKTTPPVLKSDGSFFLYSKLTVDKSRWQQGNVFSCSVMHEALHNHYTQKSLSLSPGGGGGSSPGQGTQSENSCTHFPGNLPNMLRDLRDAFSRVKTFFRMKDQLDNLLLKESLLEDFKGYLGCQALSEMIQFYLEEVMPQAENQDPDIKAHVNSLGENLKTLRLRLRRCHRFLPCENGGGSGGKSKAVEQVKNAFNKLQEKGIYKAMSEFDIFINYIEAYMTMKIRN

SEQ ID NO: 1388 - protein, 236 aa, synthetic construct; identical to SEQ ID NO: 1056
  REGION 1..236: note = Synthetic

SEQ ID NO: 1389 - protein, 419 aa, synthetic construct; identical to SEQ ID NO: 1101
  REGION 1..419: note = Synthetic

SEQ ID NO: 1390 - protein, 641 aa, synthetic construct
  REGION 1..641: note = Synthetic
MDMRVPAQLLGLLLLWLRGARCEVQLLESGGGLVQPGGSLRLSCAASGFTFSSYAMTWVRQAPGRGLQWVSTISGSGSNTYYADSVKGRFTISRDNSKNTLYLQMSSLRAEDTAVYYCAKEGGSNRYFHHWGQGTLVTISSASTKGPSVFPLAPSSKSTSGGTAALGCLVKDYFPEPVTVSWNSGALTSGVHTFPAVLQSSGLYSLSSVVTVPSSSLGTQTYICNVNHKPSNTKVDKKVEPKSCDKTHTCPPCPAPELLGGPSVFLFPPKPKDTLMISRTPEVTCVVVDVSHEDPEVKFNWYVDGVEVHNAKTKPCEEQYGSTYRCVSVLTVLHQDWLNGKEYKCKVSNKALPAPIEKTISKAKGQPREPQVYTLPPSRKEMTKNQVSLTCLVKGFYPSDIAVEWESNGQPENNYKTTPPVLKSDGSFFLYSKLTVDKSRWQQGNVFSCSVMHEALHNHYTQKSLSLSPGGGGGSSPGQGTQSENSCTHFPGNLPNMLRDLRDAFSRVKTFFQMKDQLDNKLLKESLLEDFKGYLGCQALSEMIQFYLEEVMPQAENQDPDIKAHVNSLGENLKTLRLRLRRCHRFLPCENGGGSGGKSKAVEQVKNAFNKLQEKGIYKAMSEFDIFINYIEAYMTMKIRN

SEQ ID NO: 1391 - protein, 236 aa, synthetic construct; identical to SEQ ID NO: 1056
  REGION 1..236: note = Synthetic

SEQ ID NO: 1392 - protein, 419 aa, synthetic construct; identical to SEQ ID NO: 1104
  REGION 1..419: note = Synthetic

SEQ ID NO: 1393 - protein, 641 aa, synthetic construct
  REGION 1..641: note = Synthetic
MDMRVPAQLLGLLLLWLRGARCEVQLLESGGGLVQPGGSLRLSCAASGFTFSSYAMTWVRQAPGRGLQWVSTISGSGSNTYYADSVKGRFTISRDNSKNTLYLQMSSLRAEDTAVYYCAKEGGSNRYFHHWGQGTLVTISSASTKGPSVFPLAPSSKSTSGGTAALGCLVKDYFPEPVTVSWNSGALTSGVHTFPAVLQSSGLYSLSSVVTVPSSSLGTQTYICNVNHKPSNTKVDKKVEPKSCDKTHTCPPCPAPELLGGPSVFLFPPKPKDTLMISRTPEVTCVVVDVSHEDPEVKFNWYVDGVEVHNAKTKPCEEQYGSTYRCVSVLTVLHQDWLNGKEYKCKVSNKALPAPIEKTISKAKGQPREPQVYTLPPSRKEMTKNQVSLTCLVKGFYPSDIAVEWESNGQPENNYKTTPPVLKSDGSFFLYSKLTVDKSRWQQGNVFSCSVMHEALHNHYTQKSLSLSPGGGGGSSPGQGTQSENSCTHFPGNLPNMLRDLRDAFSRVDTFFQMKDQLDNLLLKESLLEDFKGYLGCQALSEMIQFYLEEVMPQAENQDPDIKAHVNSLGENLKTLRLRLRRCHRFLPCENGGGSGGKSKAVEQVKNAFNKLQEKGIYKAMSEFDIFINYIEAYMTMKIRN

SEQ ID NO: 1394 - protein, 236 aa, synthetic construct; identical to SEQ ID NO: 1056
  REGION 1..236: note = Synthetic

SEQ ID NO: 1395 - protein, 419 aa, synthetic construct; identical to SEQ ID NO: 1107
  REGION 1..419: note = Synthetic

SEQ ID NO: 1396 - protein, 641 aa, synthetic construct
  REGION 1..641: note = Synthetic
MDMRVPAQLLGLLLLWLRGARCEVQLLESGGGLVQPGGSLRLSCAASGFTFSSYAMTWVRQAPGRGLQWVSTISGSGSNTYYADSVKGRFTISRDNSKNTLYLQMSSLRAEDTAVYYCAKEGGSNRYFHHWGQGTLVTISSASTKGPSVFPLAPSSKSTSGGTAALGCLVKDYFPEPVTVSWNSGALTSGVHTFPAVLQSSGLYSLSSVVTVPSSSLGTQTYICNVNHKPSNTKVDKKVEPKSCDKTHTCPPCPAPELLGGPSVFLFPPKPKDTLMISRTPEVTCVVVDVSHEDPEVKFNWYVDGVEVHNAKTKPCEEQYGSTYRCVSVLTVLHQDWLNGKEYKCKVSNKALPAPIEKTISKAKGQPREPQVYTLPPSRKEMTKNQVSLTCLVKGFYPSDIAVEWESNGQPENNYKTTPPVLKSDGSFFLYSKLTVDKSRWQQGNVFSCSVMHEALHNHYTQKSLSLSPGGGGGSSPGQGTQSENSCTHFPGNLPNMLRDLRDAFSRVKTFFEMKDQLDNLLLKESLLEDFKGYLGCQALSEMIQFYLEEVMPQAENQDPDIKAHVNSLGENLKTLRLRLRRCHRFLPCENGGGSGGKSKAVEQVKNAFNKLQEKGIYKAMSEFDIFINYIEAYMTMKIRN

SEQ ID NO: 1397 - protein, 236 aa, synthetic construct; identical to SEQ ID NO: 1056
  REGION 1..236: note = Synthetic

SEQ ID NO: 1398 - protein, 419 aa, synthetic construct; identical to SEQ ID NO: 1110
  REGION 1..419: note = Synthetic

SEQ ID NO: 1399 - protein, 644 aa, synthetic construct
  REGION 1..644: note = Synthetic
MDMRVPAQLLGLLLLWLRGARCQVQLVQSGAEVKKPGASVKVSCKASGYTFTRYDINWVRQATGQGLEWMGWMNPNSGNSGSVQKFRGRVTMTRDTSIHIAYMELSSLRSEDTAVYYCARGGYTSSWRWYFDLWGRGTLVTVSSASTKGPSVFPLAPSSKSTSGGTAALGCLVKDYFPEPVTVSWNSGALTSGVHTFPAVLQSSGLYSLSSVVTVPSSSLGTQTYICNVNHKPSNTKVDKKVEPKSCDKTHTCPPCPAPELLGGPSVFLFPPKPKDTLMISRTPEVTCVVVDVSHEDPEVKFNWYVDGVEVHNAKTKPCEEQYGSTYRCVSVLTVLHQDWLNGKEYKCKVSNKALPAPIEKTISKAKGQPREPQVYTLPPSRKEMTKNQVSLTCLVKGFYPSDIAVEWESNGQPENNYKTTPPVLKSDGSFFLYSKLTVDKSRWQQGNVFSCSVMHEALHNHYTQKSLSLSPGGGGGSSPGQGTQSENSCTHFPGNLPNMLRDLLDAFSRVKTFFQMKDQLDNLLLKESLLEDFKGYLGCQALSEMIQFYLEEVMPQAENQDPDIKAHVNSLGENLKTLRLRLRRCHRFLPCENGGGSGGKSKAVEQVKNAFNKLQEKGIYKAMSEFDIFINYIEAYMTMKIRN

SEQ ID NO: 1400 - protein, 236 aa, synthetic construct; identical to SEQ ID NO: 1072
  REGION 1..236: note = Synthetic

SEQ ID NO: 1401 - protein, 419 aa, synthetic construct; identical to SEQ ID NO: 1089
  REGION 1..419: note = Synthetic

SEQ ID NO: 1402 - protein, 644 aa, synthetic construct
  REGION 1..644: note = Synthetic
MDMRVPAQLLGLLLLWLRGARCQVQLVQSGAEVKKPGASVKVSCKASGYTFTRYDINWVRQATGQGLEWMGWMNPNSGNSGSVQKFRGRVTMTRDTSIHIAYMELSSLRSEDTAVYYCARGGYTSSWRWYFDLWGRGTLVTVSSASTKGPSVFPLAPSSKSTSGGTAALGCLVKDYFPEPVTVSWNSGALTSGVHTFPAVLQSSGLYSLSSVVTVPSSSLGTQTYICNVNHKPSNTKVDKKVEPKSCDKTHTCPPCPAPELLGGPSVFLFPPKPKDTLMISRTPEVTCVVVDVSHEDPEVKFNWYVDGVEVHNAKTKPCEEQYGSTYRCVSVLTVLHQDWLNGKEYKCKVSNKALPAPIEKTISKAKGQPREPQVYTLPPSRKEMTKNQVSLTCLVKGFYPSDIAVEWESNGQPENNYKTTPPVLKSDGSFFLYSKLTVDKSRWQQGNVFSCSVMHEALHNHYTQKSLSLSPGGGGGSSPGQGTQSENSCTHFPGNLPNMLRDLRDAFSRVKTFFQMKDQLDNLLLKESLLEDFKGYLGCQALSEMIQFYLEEVMPQAENQDPDIKAHVNSLGENLKTLRLRLRRCHRFLPCENGGGSGGKSKAVEQVKNAFNKLQEKGIYLAMSEFDIFINYIEAYMTMKIRN

SEQ ID NO: 1403 - protein, 236 aa, synthetic construct; identical to SEQ ID NO: 1072
  REGION 1..236: note = Synthetic

SEQ ID NO: 1404 - protein, 419 aa, synthetic construct; identical to SEQ ID NO: 1092
  REGION 1..419: note = Synthetic

SEQ ID NO: 1405 - protein, 644 aa, synthetic construct
  REGION 1..644: note = Synthetic
MDMRVPAQLLGLLLLWLRGARCQVQLVQSGAEVKKPGASVKVSCKASGYTFTRYDINWVRQATGQGLEWMGWMNPNSGNSGSVQKFRGRVTMTRDTSIHIAYMELSSLRSEDTAVYYCARGGYTSSWRWYFDLWGRGTLVTVSSASTKGPSVFPLAPSSKSTSGGTAALGCLVKDYFPEPVTVSWNSGALTSGVHTFPAVLQSSGLYSLSSVVTVPSSSLGTQTYICNVNHKPSNTKVDKKVEPKSCDKTHTCPPCPAPELLGGPSVFLFPPKPKDTLMISRTPEVTCVVVDVSHEDPEVKFNWYVDGVEVHNAKTKPCEEQYGSTYRCVSVLTVLHQDWLNGKEYKCKVSNKALPAPIEKTISKAKGQPREPQVYTLPPSRKEMTKNQVSLTCLVKGFYPSDIAVEWESNGQPENNYKTTPPVLKSDGSFFLYSKLTVDKSRWQQGNVFSCSVMHEALHNHYTQKSLSLSPGGGGGSSPGQGTQSENSCTHFPGNLPNMLRDLRDAFSRVKTFFQMKDQLDNLLLKESLLEDFKGYLGCQALSEMIQFYLEEVMPQAENQDPDIKAHVNSLGENLKTLRLRLRRCHRFLPCENGGGSGGKSKAVEQVKNAFNKLQEKGIYDAMSEFDIFINYIEAYMTMKIRN

SEQ ID NO: 1406 - protein, 236 aa, synthetic construct; identical to SEQ ID NO: 1072
  REGION 1..236: note = Synthetic

SEQ ID NO: 1407 - protein, 419 aa, synthetic construct; identical to SEQ ID NO: 1095
  REGION 1..419: note = Synthetic

SEQ ID NO: 1408 - protein, 644 aa, synthetic construct
  REGION 1..644: note = Synthetic
MDMRVPAQLLGLLLLWLRGARCQVQLVQSGAEVKKPGASVKVSCKASGYTFTRYDINWVRQATGQGLEWMGWMNPNSGNSGSVQKFRGRVTMTRDTSIHIAYMELSSLRSEDTAVYYCARGGYTSSWRWYFDLWGRGTLVTVSSASTKGPSVFPLAPSSKSTSGGTAALGCLVKDYFPEPVTVSWNSGALTSGVHTFPAVLQSSGLYSLSSVVTVPSSSLGTQTYICNVNHKPSNTKVDKKVEPKSCDKTHTCPPCPAPELLGGPSVFLFPPKPKDTLMISRTPEVTCVVVDVSHEDPEVKFNWYVDGVEVHNAKTKPCEEQYGSTYRCVSVLTVLHQDWLNGKEYKCKVSNKALPAPIEKTISKAKGQPREPQVYTLPPSRKEMTKNQVSLTCLVKGFYPSDIAVEWESNGQPENNYKTTPPVLKSDGSFFLYSKLTVDKSRWQQGNVFSCSVMHEALHNHYTQKSLSLSPGGGGGSSPGQGTQSENSCTHFPGNLPNMLRDLRDAFSRVKTFFQMKGQLDNLLLKESLLEDFKGYLGCQALSEMIQFYLEEVMPQAENQDPDIKAHVNSLGENLKTLRLRLRRCHRFLPCENGGGSGGKSKAVEQVKNAFNKLQEKGIYKAMSEFDIFINYIEAYMTMKIRN

SEQ ID NO: 1409 - protein, 236 aa, synthetic construct; identical to SEQ ID NO: 1072
  REGION 1..236: note = Synthetic

SEQ ID NO: 1410 - protein, 419 aa, synthetic construct; identical to SEQ ID NO: 1098
  REGION 1..419: note = Synthetic

SEQ ID NO: 1411 - protein, 644 aa, synthetic construct
  REGION 1..644: note = Synthetic
MDMRVPAQLLGLLLLWLRGARCQVQLVQSGAEVKKPGASVKVSCKASGYTFTRYDINWVRQATGQGLEWMGWMNPNSGNSGSVQKFRGRVTMTRDTSIHIAYMELSSLRSEDTAVYYCARGGYTSSWRWYFDLWGRGTLVTVSSASTKGPSVFPLAPSSKSTSGGTAALGCLVKDYFPEPVTVSWNSGALTSGVHTFPAVLQSSGLYSLSSVVTVPSSSLGTQTYICNVNHKPSNTKVDKKVEPKSCDKTHTCPPCPAPELLGGPSVFLFPPKPKDTLMISRTPEVTCVVVDVSHEDPEVKFNWYVDGVEVHNAKTKPCEEQYGSTYRCVSVLTVLHQDWLNGKEYKCKVSNKALPAPIEKTISKAKGQPREPQVYTLPPSRKEMTKNQVSLTCLVKGFYPSDIAVEWESNGQPENNYKTTPPVLKSDGSFFLYSKLTVDKSRWQQGNVFSCSVMHEALHNHYTQKSLSLSPGGGGGSSPGQGTQSENSCTHFPGNLPNMLRDLRDAFSRVKTFFRMKDQLDNLLLKESLLEDFKGYLGCQALSEMIQFYLEEVMPQAENQDPDIKAHVNSLGENLKTLRLRLRRCHRFLPCENGGGSGGKSKAVEQVKNAFNKLQEKGIYKAMSEFDIFINYIEAYMTMKIRN

SEQ ID NO: 1412 - protein, 236 aa, synthetic construct; identical to SEQ ID NO: 1072
  REGION 1..236: note = Synthetic

SEQ ID NO: 1413 - protein, 419 aa, synthetic construct; identical to SEQ ID NO: 1101
  REGION 1..419: note = Synthetic

SEQ ID NO: 1414 - protein, 644 aa, synthetic construct
  REGION 1..644: note = Synthetic
MDMRVPAQLLGLLLLWLRGARCQVQLVQSGAEVKKPGASVKVSCKASGYTFTRYDINWVRQATGQGLEWMGWMNPNSGNSGSVQKFRGRVTMTRDTSIHIAYMELSSLRSEDTAVYYCARGGYTSSWRWYFDLWGRGTLVTVSSASTKGPSVFPLAPSSKSTSGGTAALGCLVKDYFPEPVTVSWNSGALTSGVHTFPAVLQSSGLYSLSSVVTVPSSSLGTQTYICNVNHKPSNTKVDKKVEPKSCDKTHTCPPCPAPELLGGPSVFLFPPKPKDTLMISRTPEVTCVVVDVSHEDPEVKFNWYVDGVEVHNAKTKPCEEQYGSTYRCVSVLTVLHQDWLNGKEYKCKVSNKALPAPIEKTISKAKGQPREPQVYTLPPSRKEMTKNQVSLTCLVKGFYPSDIAVEWESNGQPENNYKTTPPVLKSDGSFFLYSKLTVDKSRWQQGNVFSCSVMHEALHNHYTQKSLSLSPGGGGGSSPGQGTQSENSCTHFPGNLPNMLRDLRDAFSRVKTFFQMKDQLDNKLLKESLLEDFKGYLGCQALSEMIQFYLEEVMPQAENQDPDIKAHVNSLGENLKTLRLRLRRCHRFLPCENGGGSGGKSKAVEQVKNAFNKLQEKGIYKAMSEFDIFINYIEAYMTMKIRN

SEQ ID NO: 1415 - protein, 236 aa, synthetic construct; identical to SEQ ID NO: 1072
  REGION 1..236: note = Synthetic

SEQ ID NO: 1416 - protein, 419 aa, synthetic construct; identical to SEQ ID NO: 1104
  REGION 1..419: note = Synthetic

SEQ ID NO: 1417 - protein, 644 aa, synthetic construct
  REGION 1..644: note = Synthetic
MDMRVPAQLLGLLLLWLRGARCQVQLVQSGAEVKKPGASVKVSCKASGYTFTRYDINWVRQATGQGLEWMGWMNPNSGNSGSVQKFRGRVTMTRDTSIHIAYMELSSLRSEDTAVYYCARGGYTSSWRWYFDLWGRGTLVTVSSASTKGPSVFPLAPSSKSTSGGTAALGCLVKDYFPEPVTVSWNSGALTSGVHTFPAVLQSSGLYSLSSVVTVPSSSLGTQTYICNVNHKPSNTKVDKKVEPKSCDKTHTCPPCPAPELLGGPSVFLFPPKPKDTLMISRTPEVTCVVVDVSHEDPEVKFNWYVDGVEVHNAKTKPCEEQYGSTYRCVSVLTVLHQDWLNGKEYKCKVSNKALPAPIEKTISKAKGQPREPQVYTLPPSRKEMTKNQVSLTCLVKGFYPSDIAVEWESNGQPENNYKTTPPVLKSDGSFFLYSKLTVDKSRWQQGNVFSCSVMHEALHNHYTQKSLSLSPGGGGGSSPGQGTQSENSCTHFPGNLPNMLRDLRDAFSRVDTFFQMKDQLDNLLLKESLLEDFKGYLGCQALSEMIQFYLEEVMPQAENQDPDIKAHVNSLGENLKTLRLRLRRCHRFLPCENGGGSGGKSKAVEQVKNAFNKLQEKGIYKAMSEFDIFINYIEAYMTMKIRN

SEQ ID NO: 1418 - protein, 236 aa, synthetic construct; identical to SEQ ID NO: 1072
  REGION 1..236: note = Synthetic

SEQ ID NO: 1419 - protein, 419 aa, synthetic construct; identical to SEQ ID NO: 1107
  REGION 1..419: note = Synthetic

SEQ ID NO: 1420 - protein, 644 aa, synthetic construct
  REGION 1..644: note = Synthetic
MDMRVPAQLLGLLLLWLRGARCQVQLVQSGAEVKKPGASVKVSCKASGYTFTRYDINWVRQATGQGLEWMGWMNPNSGNSGSVQKFRGRVTMTRDTSIHIAYMELSSLRSEDTAVYYCARGGYTSSWRWYFDLWGRGTLVTVSSASTKGPSVFPLAPSSKSTSGGTAALGCLVKDYFPEPVTVSWNSGALTSGVHTFPAVLQSSGLYSLSSVVTVPSSSLGTQTYICNVNHKPSNTKVDKKVEPKSCDKTHTCPPCPAPELLGGPSVFLFPPKPKDTLMISRTPEVTCVVVDVSHEDPEVKFNWYVDGVEVHNAKTKPCEEQYGSTYRCVSVLTVLHQDWLNGKEYKCKVSNKALPAPIEKTISKAKGQPREPQVYTLPPSRKEMTKNQVSLTCLVKGFYPSDIAVEWESNGQPENNYKTTPPVLKSDGSFFLYSKLTVDKSRWQQGNVFSCSVMHEALHNHYTQKSLSLSPGGGGGSSPGQGTQSENSCTHFPGNLPNMLRDLRDAFSRVKTFFEMKDQLDNLLLKESLLEDFKGYLGCQALSEMIQFYLEEVMPQAENQDPDIKAHVNSLGENLKTLRLRLRRCHRFLPCENGGGSGGKSKAVEQVKNAFNKLQEKGIYKAMSEFDIFINYIEAYMTMKIRN

SEQ ID NO: 1421 - protein, 236 aa, synthetic construct; identical to SEQ ID NO: 1072
  REGION 1..236: note = Synthetic

SEQ ID NO: 1422 - protein, 419 aa, synthetic construct; identical to SEQ ID NO: 1110
  REGION 1..419: note = Synthetic

SEQ ID NO: 1423 - protein, 116 aa, synthetic construct
  REGION 1..116: note = Synthetic
SPGQGTQSENSCTHFPGNLPNMLRDLLDAFSRVKTFFQMKDQLDNLLLKESLLEDFKGYLGCQALSEMIQFYLEEVMPQAENQDPDIKAHVNSLGENLKTLRLRLRRCHRFLPCEN

SEQ ID NO: 1424 - protein, 44 aa, synthetic construct
  REGION 1..44: note = Synthetic
KSKAVEQVKNAFNKLQEKGIYKAMSEFDIFINYIEAYMTMKIRN

SEQ ID NO: 1425 - protein, 116 aa, synthetic construct
  REGION 1..116: note = Synthetic
SPGQGTQSENSCTHFPGNLPNMLRDLRDAFSRVKTFFQMKDQLDNLLLKESLLEDFKGYLGCQALSEMIQFYLEEVMPQAENQDPDIKAHVNSLGENLKTLRLRLRRCHRFLPCEN

SEQ ID NO: 1426 - protein, 44 aa, synthetic construct
  REGION 1..44: note = Synthetic
KSKAVEQVKNAFNKLQEKGIYLAMSEFDIFINYIEAYMTMKIRN

SEQ ID NO: 1427 - protein, 116 aa, synthetic construct; identical to SEQ ID NO: 1425
  REGION 1..116: note = Synthetic

SEQ ID NO: 1428 - protein, 44 aa, synthetic construct
  REGION 1..44: note = Synthetic
KSKAVEQVKNAFNKLQEKGIYDAMSEFDIFINYIEAYMTMKIRN

SEQ ID NO: 1429 - protein, 116 aa, synthetic construct
  REGION 1..116: note = Synthetic
SPGQGTQSENSCTHFPGNLPNMLRDLRDAFSRVKTFFQMKGQLDNLLLKESLLEDFKGYLGCQALSEMIQFYLEEVMPQAENQDPDIKAHVNSLGENLKTLRLRLRRCHRFLPCEN

SEQ ID NO: 1430 - protein, 44 aa, synthetic construct; identical to SEQ ID NO: 1424
  REGION 1..44: note = Synthetic

SEQ ID NO: 1431 - protein, 116 aa, synthetic construct
  REGION 1..116: note = Synthetic
SPGQGTQSENSCTHFPGNLPNMLRDLRDAFSRVKTFFRMKDQLDNLLLKESLLEDFKGYLGCQALSEMIQFYLEEVMPQAENQDPDIKAHVNSLGENLKTLRLRLRRCHRFLPCEN

SEQ ID NO: 1432 - protein, 44 aa, synthetic construct; identical to SEQ ID NO: 1424
  REGION 1..44: note = Synthetic

SEQ ID NO: 1433 - protein, 116 aa, synthetic construct
  REGION 1..116: note = Synthetic
SPGQGTQSENSCTHFPGNLPNMLRDLRDAFSRVKTFFQMKDQLDNKLLKESLLEDFKGYLGCQALSEMIQFYLEEVMPQAENQDPDIKAHVNSLGENLKTLRLRLRRCHRFLPCEN

SEQ ID NO: 1434 - protein, 44 aa, synthetic construct; identical to SEQ ID NO: 1424
  REGION 1..44: note = Synthetic

SEQ ID NO: 1435 - protein, 116 aa, synthetic construct
  REGION 1..116: note = Synthetic
SPGQGTQSENSCTHFPGNLPNMLRDLRDAFSRVDTFFQMKDQLDNLLLKESLLEDFKGYLGCQALSEMIQFYLEEVMPQAENQDPDIKAHVNSLGENLKTLRLRLRRCHRFLPCEN

SEQ ID NO: 1436 - protein, 44 aa, synthetic construct; identical to SEQ ID NO: 1424
  REGION 1..44: note = Synthetic

SEQ ID NO: 1437 - protein, 116 aa, synthetic construct
  REGION 1..116: note = Synthetic
SPGQGTQSENSCTHFPGNLPNMLRDLRDAFSRVKTFFEMKDQLDNLLLKESLLEDFKGYLGCQALSEMIQFYLEEVMPQAENQDPDIKAHVNSLGENLKTLRLRLRRCHRFLPCEN

SEQ ID NO: 1438 - protein, 44 aa, synthetic construct; identical to SEQ ID NO: 1424
  REGION 1..44: note = Synthetic

SEQ ID NO: 1439 - protein, 116 aa, synthetic construct; identical to SEQ ID NO: 1423
  REGION 1..116: note = Synthetic

SEQ ID NO: 1440 - protein, 44 aa, synthetic construct; identical to SEQ ID NO: 1424
  REGION 1..44: note = Synthetic

SEQ ID NO: 1441 - protein, 116 aa, synthetic construct; identical to SEQ ID NO: 1425
  REGION 1..116: note = Synthetic

SEQ ID NO: 1442 - protein, 44 aa, synthetic construct; identical to SEQ ID NO: 1426
  REGION 1..44: note = Synthetic

SEQ ID NO: 1443 - protein, 116 aa, synthetic construct; identical to SEQ ID NO: 1425
  REGION 1..116: note = Synthetic

SEQ ID NO: 1444 - protein, 44 aa, synthetic construct; identical to SEQ ID NO: 1428
  REGION 1..44: note = Synthetic

SEQ ID NO: 1445 - protein, 116 aa, synthetic construct; identical to SEQ ID NO: 1429
  REGION 1..116: note = Synthetic

SEQ ID NO: 1446 - protein, 44 aa, synthetic construct; identical to SEQ ID NO: 1424
  REGION 1..44: note = Synthetic

SEQ ID NO: 1447 - protein, 116 aa, synthetic construct; identical to SEQ ID NO: 1431
  REGION 1..116: note = Synthetic

SEQ ID NO: 1448 - protein, 44 aa, synthetic construct; identical to SEQ ID NO: 1424
  REGION 1..44: note = Synthetic

SEQ ID NO: 1449 - protein, 116 aa, synthetic construct; identical to SEQ ID NO: 1433
  REGION 1..116: note = Synthetic

SEQ ID NO: 1450 - protein, 44 aa, synthetic construct; identical to SEQ ID NO: 1424
  REGION 1..44: note = Synthetic

SEQ ID NO: 1451 - protein, 116 aa, synthetic construct; identical to SEQ ID NO: 1435
  REGION 1..116: note = Synthetic

SEQ ID NO: 1452 - protein, 44 aa, synthetic construct; identical to SEQ ID NO: 1424
  REGION 1..44: note = Synthetic

SEQ ID NO: 1453 - protein, 116 aa, synthetic construct; identical to SEQ ID NO: 1437
  REGION 1..116: note = Synthetic

SEQ ID NO: 1454 - protein, 44 aa, synthetic construct; identical to SEQ ID NO: 1424
  REGION 1..44: note = Synthetic

SEQ ID NO: 1455 - protein, 116 aa, synthetic construct; identical to SEQ ID NO: 1423
  REGION 1..116: note = Synthetic

SEQ ID NO: 1456 - protein, 44 aa, synthetic construct; identical to SEQ ID NO: 1424
  REGION 1..44: note = Synthetic

SEQ ID NO: 1457 - protein, 116 aa, synthetic construct; identical to SEQ ID NO: 1425
  REGION 1..116: note = Synthetic

SEQ ID NO: 1458 - protein, 44 aa, synthetic construct; identical to SEQ ID NO: 1426
  REGION 1..44: note = Synthetic

SEQ ID NO: 1459 - protein, 116 aa, synthetic construct; identical to SEQ ID NO: 1425
  REGION 1..116: note = Synthetic

SEQ ID NO: 1460 - protein, 44 aa, synthetic construct; identical to SEQ ID NO: 1428
  REGION 1..44: note = Synthetic

SEQ ID NO: 1461 - protein, 116 aa, synthetic construct; identical to SEQ ID NO: 1429
  REGION 1..116: note = Synthetic

SEQ ID NO: 1462 - protein, 44 aa, synthetic construct; identical to SEQ ID NO: 1424
  REGION 1..44: note = Synthetic

SEQ ID NO: 1463 - protein, 116 aa, synthetic construct; identical to SEQ ID NO: 1431
  REGION 1..116: note = Synthetic

SEQ ID NO: 1464 - protein, 44 aa, synthetic construct; identical to SEQ ID NO: 1424
  REGION 1..44: note = Synthetic

SEQ ID NO: 1465 - protein, 116 aa, synthetic construct; identical to SEQ ID NO: 1433
  REGION 1..116: note = Synthetic

SEQ ID NO: 1466 - protein, 44 aa, synthetic construct; identical to SEQ ID NO: 1424
  REGION 1..44: note = Synthetic

SEQ ID NO: 1467 - protein, 116 aa, synthetic construct; identical to SEQ ID NO: 1435
  REGION 1..116: note = Synthetic

SEQ ID NO: 1468 - protein, 44 aa, synthetic construct; identical to SEQ ID NO: 1424
  REGION 1..44: note = Synthetic

SEQ ID NO: 1469 - protein, 116 aa, synthetic construct; identical to SEQ ID NO: 1437
  REGION 1..116: note = Synthetic

SEQ ID NO: 1470 - protein, 44 aa, synthetic construct; identical to SEQ ID NO: 1424
  REGION 1..44: note = Synthetic

SEQ ID NO: 1471 - protein, 116 aa, synthetic construct; identical to SEQ ID NO: 1423
  REGION 1..116: note = Synthetic

SEQ ID NO: 1472 - protein, 44 aa, synthetic construct; identical to SEQ ID NO: 1424
  REGION 1..44: note = Synthetic

SEQ ID NO: 1473 - protein, 116 aa, synthetic construct; identical to SEQ ID NO: 1425
  REGION 1..116: note = Synthetic

SEQ ID NO: 1474 - protein, 44 aa, synthetic construct; identical to SEQ ID NO: 1426
  REGION 1..44: note = Synthetic

SEQ ID NO: 1475 - protein, 116 aa, synthetic construct; identical to SEQ ID NO: 1425
  REGION 1..116: note = Synthetic

SEQ ID NO: 1476 - protein, 44 aa, synthetic construct; identical to SEQ ID NO: 1428
  REGION 1..44: note = Synthetic

SEQ ID NO: 1477 - protein, 116 aa, synthetic construct; identical to SEQ ID NO: 1429
  REGION 1..116: note = Synthetic

SEQ ID NO: 1478 - protein, 44 aa, synthetic construct; identical to SEQ ID NO: 1424
  REGION 1..44: note = Synthetic

SEQ ID NO: 1479 - protein, 116 aa, synthetic construct; identical to SEQ ID NO: 1431
  REGION 1..116: note = Synthetic

SEQ ID NO: 1480 - protein, 44 aa, synthetic construct; identical to SEQ ID NO: 1424
  REGION 1..44: note = Synthetic

SEQ ID NO: 1481 - protein, 116 aa, synthetic construct; identical to SEQ ID NO: 1433
  REGION 1..116: note = Synthetic

SEQ ID NO: 1482 - protein, 44 aa, synthetic construct; identical to SEQ ID NO: 1424
  REGION 1..44: note = Synthetic

SEQ ID NO: 1483 - protein, 116 aa, synthetic construct; identical to SEQ ID NO: 1435
  REGION 1..116: note = Synthetic

SEQ ID NO: 1484 - protein, 44 aa, synthetic construct; identical to SEQ ID NO: 1424
  REGION 1..44: note = Synthetic

SEQ ID NO: 1485 - protein, 116 aa, synthetic construct; identical to SEQ ID NO: 1437
  REGION 1..116: note = Synthetic

SEQ ID NO: 1486 - protein, 44 aa, synthetic construct; identical to SEQ ID NO: 1424
  REGION 1..44: note = Synthetic

SEQ ID NO: 1487 - protein, 116 aa, synthetic construct; identical to SEQ ID NO: 1423
  REGION 1..116: note = Synthetic

SEQ ID NO: 1488 - protein, 44 aa, synthetic construct; identical to SEQ ID NO: 1424
  REGION 1..44: note = Synthetic

SEQ ID NO: 1489 - protein, 116 aa, synthetic construct; identical to SEQ ID NO: 1425
  REGION 1..116: note = Synthetic

SEQ ID NO: 1490 - protein, 44 aa, synthetic construct; identical to SEQ ID NO: 1426
  REGION 1..44: note = Synthetic

SEQ ID NO: 1491 - protein, 116 aa, synthetic construct; identical to SEQ ID NO: 1425
  REGION 1..116: note = Synthetic

SEQ ID NO: 1492 - protein, 44 aa, synthetic construct; identical to SEQ ID NO: 1428
  REGION 1..44: note = Synthetic

SEQ ID NO: 1493 - protein, 116 aa, synthetic construct; identical to SEQ ID NO: 1429
  REGION 1..116: note = Synthetic

SEQ ID NO: 1494 - protein, 44 aa, synthetic construct; identical to SEQ ID NO: 1424
  REGION 1..44: note = Synthetic

SEQ ID NO: 1495 - protein, 116 aa, synthetic construct; identical to SEQ ID NO: 1431
  REGION 1..116: note = Synthetic

SEQ ID NO: 1496 - protein, 44 aa, synthetic construct; identical to SEQ ID NO: 1424
  REGION 1..44: note = Synthetic

SEQ ID NO: 1497 - protein, 116 aa, synthetic construct; identical to SEQ ID NO: 1433
  REGION 1..116: note = Synthetic

SEQ ID NO: 1498 - protein, 44 aa, synthetic construct; identical to SEQ ID NO: 1424
  REGION 1..44: note = Synthetic

SEQ ID NO: 1499 - protein, 116 aa, synthetic construct; identical to SEQ ID NO: 1435
  REGION 1..116: note = Synthetic

SEQ ID NO: 1500 - protein, 44 aa, synthetic construct; identical to SEQ ID NO: 1424
  REGION 1..44: note = Synthetic

SEQ ID NO: 1501 - protein, 116 aa, synthetic construct; identical to SEQ ID NO: 1437
  REGION 1..116: note = Synthetic

SEQ ID NO: 1502 - protein, 44 aa, synthetic construct; identical to SEQ ID NO: 1424
  REGION 1..44: note = Synthetic

SEQ ID NO: 1503 - protein, 116 aa, synthetic construct; identical to SEQ ID NO: 1423
  REGION 1..116: note = Synthetic

SEQ ID NO: 1504 - protein, 44 aa, synthetic construct; identical to SEQ ID NO: 1424
  REGION 1..44: note = Synthetic

SEQ ID NO: 1505 - protein, 116 aa, synthetic construct; identical to SEQ ID NO: 1425
  REGION 1..116: note = Synthetic

SEQ ID NO: 1506 - protein, 44 aa, synthetic construct; identical to SEQ ID NO: 1426
  REGION 1..44: note = Synthetic

SEQ ID NO: 1507 - protein, 116 aa, synthetic construct; identical to SEQ ID NO: 1425
  REGION 1..116: note = Synthetic

SEQ ID NO: 1508 - protein, 44 aa, synthetic construct; identical to SEQ ID NO: 1428
  REGION 1..44: note = Synthetic

SEQ ID NO: 1509 - protein, 116 aa, synthetic construct; identical to SEQ ID NO: 1429
  REGION 1..116: note = Synthetic

SEQ ID NO: 1510 - protein, 44 aa, synthetic construct; identical to SEQ ID NO: 1424
  REGION 1..44: note = Synthetic

SEQ ID NO: 1511 - protein, 116 aa, synthetic construct; identical to SEQ ID NO: 1431
  REGION 1..116: note = Synthetic

SEQ ID NO: 1512 - protein, 44 aa, synthetic construct; identical to SEQ ID NO: 1424
  REGION 1..44: note = Synthetic

SEQ ID NO: 1513 - protein, 116 aa, synthetic construct; identical to SEQ ID NO: 1433
  REGION 1..116: note = Synthetic

SEQ ID NO: 1514 - protein, 44 aa, synthetic construct; identical to SEQ ID NO: 1424
  REGION 1..44: note = Synthetic

SEQ ID NO: 1515 - protein, 116 aa, synthetic construct; identical to SEQ ID NO: 1435
  REGION 1..116: note = Synthetic

SEQ ID NO: 1516 - protein, 44 aa, synthetic construct; identical to SEQ ID NO: 1424
  REGION 1..44: note = Synthetic

SEQ ID NO: 1517 - protein, 116 aa, synthetic construct; identical to SEQ ID NO: 1437
  REGION 1..116: note = Synthetic

SEQ ID NO: 1518 - protein, 44 aa, synthetic construct; identical to SEQ ID NO: 1424
  REGION 1..44: note = Synthetic

SEQ ID NO: 1519 - protein, 116 aa, synthetic construct; identical to SEQ ID NO: 1423
  REGION 1..116: note = Synthetic

SEQ ID NO: 1520 - protein, 44 aa, synthetic construct; identical to SEQ ID NO: 1424
  REGION 1..44: note = Synthetic

SEQ ID NO: 1521 - protein, 116 aa, synthetic construct; identical to SEQ ID NO: 1425
  REGION 1..116: note = Synthetic

SEQ ID NO: 1522 - protein, 44 aa, synthetic construct; identical to SEQ ID NO: 1426
  REGION 1..44: note = Synthetic

SEQ ID NO: 1523 - protein, 116 aa, synthetic construct; identical to SEQ ID NO: 1425
  REGION 1..116: note = Synthetic

SEQ ID NO: 1524 - protein, 44 aa, synthetic construct; identical to SEQ ID NO: 1428
  REGION 1..44: note = Synthetic

SEQ ID NO: 1525 - protein, 116 aa, synthetic construct; identical to SEQ ID NO: 1429
  REGION 1..116: note = Synthetic

SEQ ID NO: 1526 - protein, 44 aa, synthetic construct; identical to SEQ ID NO: 1424
  REGION 1..44: note = Synthetic

SEQ ID NO: 1527 - protein, 116 aa, synthetic construct; identical to SEQ ID NO: 1431
  REGION 1..116: note = Synthetic

SEQ ID NO: 1528 - protein, 44 aa, synthetic construct; identical to SEQ ID NO: 1424
  REGION 1..44: note = Synthetic

SEQ ID NO: 1529 - protein, 116 aa, synthetic construct; identical to SEQ ID NO: 1433
  REGION 1..116: note = Synthetic

SEQ ID NO: 1530 - protein, 44 aa, synthetic construct; identical to SEQ ID NO: 1424
  REGION 1..44: note = Synthetic

SEQ ID NO: 1531 - protein, 116 aa, synthetic construct; identical to SEQ ID NO: 1435
  REGION 1..116: note = Synthetic

SEQ ID NO: 1532 - protein, 44 aa, synthetic construct; identical to SEQ ID NO: 1424
  REGION 1..44: note = Synthetic

SEQ ID NO: 1533 - protein, 116 aa, synthetic construct; identical to SEQ ID NO: 1437
  REGION 1..116: note = Synthetic

SEQ ID NO: 1534 - protein, 44 aa, synthetic construct; identical to SEQ ID NO: 1424
  REGION 1..44: note = Synthetic

SEQ ID NO: 1535 - protein, 116 aa, synthetic construct; identical to SEQ ID NO: 1423
  REGION 1..116: note = Synthetic

SEQ ID NO: 1536 - protein, 44 aa, synthetic construct; identical to SEQ ID NO: 1424
  REGION 1..44: note = Synthetic

SEQ ID NO: 1537 - protein, 116 aa, synthetic construct; identical to SEQ ID NO: 1425
  REGION 1..116: note = Synthetic

SEQ ID NO: 1538 - protein, 44 aa, synthetic construct; identical to SEQ ID NO: 1426
  REGION 1..44: note = Synthetic

SEQ ID NO: 1539 - protein, 116 aa, synthetic construct; identical to SEQ ID NO: 1425
  REGION 1..116: note = Synthetic

SEQ ID NO: 1540 - protein, 44 aa, synthetic construct; identical to SEQ ID NO: 1428
  REGION 1..44: note = Synthetic

SEQ ID NO: 1541 - protein, 116 aa, synthetic construct; identical to SEQ ID NO: 1429
  REGION 1..116: note = Synthetic

SEQ ID NO: 1542 - protein, 44 aa, synthetic construct; identical to SEQ ID NO: 1424
  REGION 1..44: note = Synthetic

SEQ ID NO: 1543 - protein, 116 aa, synthetic construct; identical to SEQ ID NO: 1431
  REGION 1..116: note = Synthetic

SEQ ID NO: 1544 - protein, 44 aa, synthetic construct; identical to SEQ ID NO: 1424
  REGION 1..44: note = Synthetic

SEQ ID NO: 1545 - protein, 116 aa, synthetic construct; identical to SEQ ID NO: 1433
  REGION 1..116: note = Synthetic

SEQ ID NO: 1546 - protein, 44 aa, synthetic construct; identical to SEQ ID NO: 1424
  REGION 1..44: note = Synthetic

SEQ ID NO: 1547 - protein, 116 aa, synthetic construct; identical to SEQ ID NO: 1435
  REGION 1..116: note = Synthetic

SEQ ID NO: 1548 - protein, 44 aa, synthetic construct; identical to SEQ ID NO: 1424
  REGION 1..44: note = Synthetic

SEQ ID NO: 1549 - protein, 116 aa, synthetic construct; identical to SEQ ID NO: 1437
  REGION 1..116: note = Synthetic

SEQ ID NO: 1550 - protein, 44 aa, synthetic construct; identical to SEQ ID NO: 1424
  REGION 1..44: note = Synthetic

SEQ ID NO: 1551 - protein, 116 aa, synthetic construct; identical to SEQ ID NO: 1423
  REGION 1..116: note = Synthetic

SEQ ID NO: 1552 - protein, 44 aa, synthetic construct; identical to SEQ ID NO: 1424
  REGION 1..44: note = Synthetic

SEQ ID NO: 1553 - protein, 116 aa, synthetic construct; identical to SEQ ID NO: 1425
  REGION 1..116: note = Synthetic

SEQ ID NO: 1554 - protein, 44 aa, synthetic construct; identical to SEQ ID NO: 1426
  REGION 1..44: note = Synthetic

SEQ ID NO: 1555 - protein, 116 aa, synthetic construct; identical to SEQ ID NO: 1425
  REGION 1..116: note = Synthetic

SEQ ID NO: 1556 - protein, 44 aa, synthetic construct; identical to SEQ ID NO: 1428
  REGION 1..44: note = Synthetic

SEQ ID NO: 1557 - protein, 116 aa, synthetic construct; identical to SEQ ID NO: 1429
  REGION 1..116: note = Synthetic

SEQ ID NO: 1558 - protein, 44 aa, synthetic construct; identical to SEQ ID NO: 1424
  REGION 1..44: note = Synthetic

SEQ ID NO: 1559 - protein, 116 aa, synthetic construct; identical to SEQ ID NO: 1431
  REGION 1..116: note = Synthetic

SEQ ID NO: 1560 - protein, 44 aa, synthetic construct; identical to SEQ ID NO: 1424
  REGION 1..44: note = Synthetic

SEQ ID NO: 1561 - protein, 116 aa, synthetic construct; identical to SEQ ID NO: 1433
  REGION 1..116: note = Synthetic

SEQ ID NO: 1562 - protein, 44 aa, synthetic construct; identical to SEQ ID NO: 1424
  REGION 1..44: note = Synthetic

SEQ ID NO: 1563 - protein, 116 aa, synthetic construct; identical to SEQ ID NO: 1435
  REGION 1..116: note = Synthetic

SEQ ID NO: 1564 - protein, 44 aa, synthetic construct; identical to SEQ ID NO: 1424
  REGION 1..44: note = Synthetic

SEQ ID NO: 1565 - protein, 116 aa, synthetic construct; identical to SEQ ID NO: 1437
  REGION 1..116: note = Synthetic

SEQ ID NO: 1566 - protein, 44 aa, synthetic construct; identical to SEQ ID NO: 1424
  REGION 1..44: note = Synthetic

SEQ ID NO: 1567 - protein, 116 aa, synthetic construct; identical to SEQ ID NO: 1423
  REGION 1..116: note = Synthetic

SEQ ID NO: 1568 - protein, 44 aa, synthetic construct; identical to SEQ ID NO: 1424
  REGION 1..44: note = Synthetic

SEQ ID NO: 1569 - protein, 116 aa, synthetic construct; identical to SEQ ID NO: 1425
  REGION 1..116: note = Synthetic

SEQ ID NO: 1570 - protein, 44 aa, synthetic construct; identical to SEQ ID NO: 1426
  REGION 1..44: note = Synthetic

SEQ ID NO: 1571 - protein, 116 aa, synthetic construct; identical to SEQ ID NO: 1425
  REGION 1..116: note = Synthetic

SEQ ID NO: 1572 - protein, 44 aa, synthetic construct; identical to SEQ ID NO: 1428
  REGION 1..44: note = Synthetic

SEQ ID NO: 1573 - protein, 116 aa, synthetic construct; identical to SEQ ID NO: 1429
  REGION 1..116: note = Synthetic

SEQ ID NO: 1574 - protein, 44 aa, synthetic construct; identical to SEQ ID NO: 1424
  REGION 1..44: note = Synthetic

SEQ ID NO: 1575 - protein, 116 aa, synthetic construct; identical to SEQ ID NO: 1431
  REGION 1..116: note = Synthetic

SEQ ID NO: 1576 - protein, 44 aa, synthetic construct; identical to SEQ ID NO: 1424
  REGION 1..44: note = Synthetic

SEQ ID NO: 1577 - protein, 116 aa, synthetic construct; identical to SEQ ID NO: 1433
  REGION 1..116: note = Synthetic

SEQ ID NO: 1578 - protein, 44 aa, synthetic construct; identical to SEQ ID NO: 1424
  REGION 1..44: note = Synthetic

SEQ ID NO: 1579 - protein, 116 aa, synthetic construct; identical to SEQ ID NO: 1435
  REGION 1..116: note = Synthetic

SEQ ID NO: 1580 - protein, 44 aa, synthetic construct; identical to SEQ ID NO: 1424
  REGION 1..44: note = Synthetic

SEQ ID NO: 1581 - protein, 116 aa, synthetic construct; identical to SEQ ID NO: 1437
  REGION 1..116: note = Synthetic

SEQ ID NO: 1582 - protein, 44 aa, synthetic construct; identical to SEQ ID NO: 1424
  REGION 1..44: note = Synthetic

SEQ ID NO: 1583 - protein, 116 aa, synthetic construct; identical to SEQ ID NO: 1423
  REGION 1..116: note = Synthetic

SEQ ID NO: 1584 - protein, 44 aa, synthetic construct; identical to SEQ ID NO: 1424
  REGION 1..44: note = Synthetic

SEQ ID NO: 1585 - protein, 116 aa, synthetic construct; identical to SEQ ID NO: 1425
  REGION 1..116: note = Synthetic

SEQ ID NO: 1586 - protein, 44 aa, synthetic construct; identical to SEQ ID NO: 1426
  REGION 1..44: note = Synthetic

SEQ ID NO: 1587 - protein, 116 aa, synthetic construct; identical to SEQ ID NO: 1425
  REGION 1..116: note = Synthetic

SEQ ID NO: 1588 - protein, 44 aa, synthetic construct; identical to SEQ ID NO: 1428
  REGION 1..44: note = Synthetic

SEQ ID NO: 1589 - protein, 116 aa, synthetic construct; identical to SEQ ID NO: 1429
  REGION 1..116: note = Synthetic

SEQ ID NO: 1590 - protein, 44 aa, synthetic construct; identical to SEQ ID NO: 1424
  REGION 1..44: note = Synthetic

SEQ ID NO: 1591 - protein, 116 aa, synthetic construct; identical to SEQ ID NO: 1431
  REGION 1..116: note = Synthetic

SEQ ID NO: 1592 - protein, 44 aa, synthetic construct; identical to SEQ ID NO: 1424
  REGION 1..44: note = Synthetic

SEQ ID NO: 1593 - protein, 116 aa, synthetic construct; identical to SEQ ID NO: 1433
  REGION 1..116: note = Synthetic

SEQ ID NO: 1594 - protein, 44 aa, synthetic construct; identical to SEQ ID NO: 1424
  REGION 1..44: note = Synthetic

SEQ ID NO: 1595 - protein, 116 aa, synthetic construct; identical to SEQ ID NO: 1435
  REGION 1..116: note = Synthetic

SEQ ID NO: 1596 - protein, 44 aa, synthetic construct; identical to SEQ ID NO: 1424
  REGION 1..44: note = Synthetic

SEQ ID NO: 1597 - protein, 116 aa, synthetic construct; identical to SEQ ID NO: 1437
  REGION 1..116: note = Synthetic

SEQ ID NO: 1598 - protein, 44 aa, synthetic construct; identical to SEQ ID NO: 1424
  REGION 1..44: note = Synthetic

SEQ ID NO: 1599 - protein, 116 aa, synthetic construct; identical to SEQ ID NO: 1423
  REGION 1..116: note = Synthetic

SEQ ID NO: 1600 - protein, 44 aa, synthetic construct; identical to SEQ ID NO: 1424
  REGION 1..44: note = Synthetic

SEQ ID NO: 1601 - protein, 116 aa, synthetic construct; identical to SEQ ID NO: 1425
  REGION 1..116: note = Synthetic

SEQ ID NO: 1602 - protein, 44 aa, synthetic construct; identical to SEQ ID NO: 1426
  REGION 1..44: note = Synthetic

SEQ ID NO: 1603 - protein, 116 aa, synthetic construct; identical to SEQ ID NO: 1425
  REGION 1..116: note = Synthetic

SEQ ID NO: 1604 - protein, 44 aa, synthetic construct; identical to SEQ ID NO: 1428
  REGION 1..44: note = Synthetic

SEQ ID NO: 1605 - protein, 116 aa, synthetic construct; identical to SEQ ID NO: 1429
  REGION 1..116: note = Synthetic

SEQ ID NO: 1606 - protein, 44 aa, synthetic construct; identical to SEQ ID NO: 1424
  REGION 1..44: note = Synthetic

SEQ ID NO: 1607 - protein, 116 aa, synthetic construct; identical to SEQ ID NO: 1431
  REGION 1..116: note = Synthetic

SEQ ID NO: 1608 - protein, 44 aa, synthetic construct; identical to SEQ ID NO: 1424
  REGION 1..44: note = Synthetic

SEQ ID NO: 1609 - protein, 116 aa, synthetic construct; identical to SEQ ID NO: 1433
  REGION 1..116: note = Synthetic

SEQ ID NO: 1610 - protein, 44 aa, synthetic construct; identical to SEQ ID NO: 1424
  REGION 1..44: note = Synthetic

SEQ ID NO: 1611 - protein, 116 aa, synthetic construct; identical to SEQ ID NO: 1435
  REGION 1..116: note = Synthetic

SEQ ID NO: 1612 - protein, 44 aa, synthetic construct; identical to SEQ ID NO: 1424
  REGION 1..44: note = Synthetic

SEQ ID NO: 1613 - protein, 116 aa, synthetic construct; identical to SEQ ID NO: 1437
  REGION 1..116: note = Synthetic

SEQ ID NO: 1614 - protein, 44 aa, synthetic construct; identical to SEQ ID NO: 1424
  REGION 1..44: note = Synthetic

SEQ ID NO: 1615 - protein, 116 aa, synthetic construct; identical to SEQ ID NO: 1423
  REGION 1..116: note = Synthetic

SEQ ID NO: 1616 - protein, 44 aa, synthetic construct; identical to SEQ ID NO: 1424
  REGION 1..44: note = Synthetic

SEQ ID NO: 1617 - protein, 116 aa, synthetic construct; identical to SEQ ID NO: 1425
  REGION 1..116: note = Synthetic

SEQ ID NO: 1618 - protein, 44 aa, synthetic construct; identical to SEQ ID NO: 1426
  REGION 1..44: note = Synthetic

SEQ ID NO: 1619 - protein, 116 aa, synthetic construct; identical to SEQ ID NO: 1425
  REGION 1..116: note = Synthetic

SEQ ID NO: 1620 - protein, 44 aa, synthetic construct; identical to SEQ ID NO: 1428
  REGION 1..44: note = Synthetic

SEQ ID NO: 1621 - protein, 116 aa, synthetic construct; identical to SEQ ID NO: 1429
  REGION 1..116: note = Synthetic

SEQ ID NO: 1622 - protein, 44 aa, synthetic construct; identical to SEQ ID NO: 1424
  REGION 1..44: note = Synthetic

SEQ ID NO: 1623 - protein, 116 aa, synthetic construct; identical to SEQ ID NO: 1431
  REGION 1..116: note = Synthetic

SEQ ID NO: 1624 - protein, 44 aa, synthetic construct; identical to SEQ ID NO: 1424
  REGION 1..44: note = Synthetic

SEQ ID NO: 1625 - protein, 116 aa, synthetic construct; identical to SEQ ID NO: 1433
  REGION 1..116: note = Synthetic

SEQ ID NO: 1626 - protein, 44 aa, synthetic construct; identical to SEQ ID NO: 1424
  REGION 1..44: note = Synthetic

SEQ ID NO: 1627 - protein, 116 aa, synthetic construct; identical to SEQ ID NO: 1435
  REGION 1..116: note = Synthetic

SEQ ID NO: 1628 - protein, 44 aa, synthetic construct; identical to SEQ ID NO: 1424
  REGION 1..44: note = Synthetic

SEQ ID NO: 1629 - protein, 116 aa, synthetic construct; identical to SEQ ID NO: 1437
  REGION 1..116: note = Synthetic

SEQ ID NO: 1630 - protein, 44 aa, synthetic construct; identical to SEQ ID NO: 1424
  REGION 1..44: note = Synthetic

SEQ ID NO: 1631 - protein, 116 aa, synthetic construct; identical to SEQ ID NO: 1423
  REGION 1..116: note = Synthetic

SEQ ID NO: 1632 - protein, 44 aa, synthetic construct; identical to SEQ ID NO: 1424
  REGION 1..44: note = Synthetic

SEQ ID NO: 1633 - protein, 116 aa, synthetic construct; identical to SEQ ID NO: 1425
  REGION 1..116: note = Synthetic

SEQ ID NO: 1634 - protein, 44 aa, synthetic construct; identical to SEQ ID NO: 1426
  REGION 1..44: note = Synthetic

SEQ ID NO: 1635 - protein, 116 aa, synthetic construct; identical to SEQ ID NO: 1425
  REGION 1..116: note = Synthetic

SEQ ID NO: 1636 - protein, 44 aa, synthetic construct; identical to SEQ ID NO: 1428
  REGION 1..44: note = Synthetic

SEQ ID NO: 1637 - protein, 116 aa, synthetic construct; identical to SEQ ID NO: 1429
  REGION 1..116: note = Synthetic

SEQ ID NO: 1638 - protein, 44 aa, synthetic construct; identical to SEQ ID NO: 1424
  REGION 1..44: note = Synthetic

SEQ ID NO: 1639 - protein, 116 aa, synthetic construct; identical to SEQ ID NO: 1431
  REGION 1..116: note = Synthetic

SEQ ID NO: 1640 - protein, 44 aa, synthetic construct; identical to SEQ ID NO: 1424
  REGION 1..44: note = Synthetic

SEQ ID NO: 1641 - protein, 116 aa, synthetic construct; identical to SEQ ID NO: 1433
  REGION 1..116: note = Synthetic

SEQ ID NO: 1642 - protein, 44 aa, synthetic construct; identical to SEQ ID NO: 1424
  REGION 1..44: note = Synthetic

SEQ ID NO: 1643 - protein, 116 aa, synthetic construct; identical to SEQ ID NO: 1435
  REGION 1..116: note = Synthetic

SEQ ID NO: 1644 - protein, 44 aa, synthetic construct; identical to SEQ ID NO: 1424
  REGION 1..44: note = Synthetic

SEQ ID NO: 1645 - protein, 116 aa, synthetic construct; identical to SEQ ID NO: 1437
  REGION 1..116: note = Synthetic

SEQ ID NO: 1646 - protein, 44 aa, synthetic construct; identical to SEQ ID NO: 1424
  REGION 1..44: note = Synthetic

SEQ ID NO: 1647 - protein, 116 aa, synthetic construct; identical to SEQ ID NO: 1423
  REGION 1..116: note = Synthetic

SEQ ID NO: 1648 - protein, 44 aa, synthetic construct; identical to SEQ ID NO: 1424
  REGION 1..44: note = Synthetic

SEQ ID NO: 1649 - protein, 116 aa, synthetic construct; identical to SEQ ID NO: 1425
  REGION 1..116: note = Synthetic

SEQ ID NO: 1650 - protein, 44 aa, synthetic construct; identical to SEQ ID NO: 1426
  REGION 1..44: note = Synthetic

SEQ ID NO: 1651 - protein, 116 aa, synthetic construct; identical to SEQ ID NO: 1425
  REGION 1..116: note = Synthetic

SEQ ID NO: 1652 - protein, 44 aa, synthetic construct; identical to SEQ ID NO: 1428
  REGION 1..44: note = Synthetic

SEQ ID NO: 1653 - protein, 116 aa, synthetic construct; identical to SEQ ID NO: 1429
  REGION 1..116: note = Synthetic

SEQ ID NO: 1654 - protein, 44 aa, synthetic construct; identical to SEQ ID NO: 1424
  REGION 1..44: note = Synthetic

SEQ ID NO: 1655 - protein, 116 aa, synthetic construct; identical to SEQ ID NO: 1431
  REGION 1..116: note = Synthetic

SEQ ID NO: 1656 - protein, 44 aa, synthetic construct; identical to SEQ ID NO: 1424
  REGION 1..44: note = Synthetic

SEQ ID NO: 1657 - protein, 116 aa, synthetic construct; identical to SEQ ID NO: 1433
  REGION 1..116: note = Synthetic

SEQ ID NO: 1658 - protein, 44 aa, synthetic construct; identical to SEQ ID NO: 1424
  REGION 1..44: note = Synthetic

SEQ ID NO: 1659 - protein, 116 aa, synthetic construct; identical to SEQ ID NO: 1435
  REGION 1..116: note = Synthetic

SEQ ID NO: 1660 - protein, 44 aa, synthetic construct; identical to SEQ ID NO: 1424
  REGION 1..44: note = Synthetic

SEQ ID NO: 1661 - protein, 116 aa, synthetic construct; identical to SEQ ID NO: 1437
  REGION 1..116: note = Synthetic

SEQ ID NO: 1662 - protein, 44 aa, synthetic construct; identical to SEQ ID NO: 1424
  REGION 1..44: note = Synthetic

SEQ ID NO: 1663 - protein, 116 aa, synthetic construct; identical to SEQ ID NO: 1423
  REGION 1..116: note = Synthetic

SEQ ID NO: 1664 - protein, 44 aa, synthetic construct; identical to SEQ ID NO: 1424
  REGION 1..44: note = Synthetic

SEQ ID NO: 1665 - protein, 116 aa, synthetic construct; identical to SEQ ID NO: 1425
  REGION 1..116: note = Synthetic

SEQ ID NO: 1666 - protein, 44 aa, synthetic construct; identical to SEQ ID NO: 1426
  REGION 1..44: note = Synthetic

SEQ ID NO: 1667 - protein, 116 aa, synthetic construct; identical to SEQ ID NO: 1425
  REGION 1..116: note = Synthetic

SEQ ID NO: 1668 - protein, 44 aa, synthetic construct; identical to SEQ ID NO: 1428
  REGION 1..44: note = Synthetic

SEQ ID NO: 1669 - protein, 116 aa, synthetic construct; identical to SEQ ID NO: 1429
  REGION 1..116: note = Synthetic

SEQ ID NO: 1670 - protein, 44 aa, synthetic construct; identical to SEQ ID NO: 1424
  REGION 1..44: note = Synthetic

SEQ ID NO: 1671 - protein, 116 aa, synthetic construct; identical to SEQ ID NO: 1431
  REGION 1..116: note = Synthetic

SEQ ID NO: 1672 - protein, 44 aa, synthetic construct; identical to SEQ ID NO: 1424
  REGION 1..44: note = Synthetic

SEQ ID NO: 1673 - protein, 116 aa, synthetic construct; identical to SEQ ID NO: 1433
  REGION 1..116: note = Synthetic

SEQ ID NO: 1674 - protein, 44 aa, synthetic construct; identical to SEQ ID NO: 1424
  REGION 1..44: note = Synthetic

SEQ ID NO: 1675 - protein, 116 aa, synthetic construct; identical to SEQ ID NO: 1435
  REGION 1..116: note = Synthetic

SEQ ID NO: 1676 - protein, 44 aa, synthetic construct; identical to SEQ ID NO: 1424
  REGION 1..44: note = Synthetic

SEQ ID NO: 1677 - protein, 116 aa, synthetic construct; identical to SEQ ID NO: 1437
  REGION 1..116: note = Synthetic

SEQ ID NO: 1678 - protein, 44 aa, synthetic construct; identical to SEQ ID NO: 1424
  REGION 1..44: note = Synthetic

SEQ ID NO: 1679 - protein, 116 aa, synthetic construct; identical to SEQ ID NO: 1423
  REGION 1..116: note = Synthetic

SEQ ID NO: 1680 - protein, 44 aa, synthetic construct; identical to SEQ ID NO: 1424
  REGION 1..44: note = Synthetic

SEQ ID NO: 1681 - protein, 116 aa, synthetic construct; identical to SEQ ID NO: 1425
  REGION 1..116: note = Synthetic

SEQ ID NO: 1682 - protein, 44 aa, synthetic construct; identical to SEQ ID NO: 1426
  REGION 1..44: note = Synthetic

SEQ ID NO: 1683 - protein, 116 aa, synthetic construct; identical to SEQ ID NO: 1425
  REGION 1..116: note = Synthetic

SEQ ID NO: 1684 - protein, 44 aa, synthetic construct; identical to SEQ ID NO: 1428
  REGION 1..44: note = Synthetic

SEQ ID NO: 1685 - protein, 116 aa, synthetic construct; identical to SEQ ID NO: 1429
  REGION 1..116: note = Synthetic

SEQ ID NO: 1686 - protein, 44 aa, synthetic construct; identical to SEQ ID NO: 1424
  REGION 1..44: note = Synthetic

SEQ ID NO: 1687 - protein, 116 aa, synthetic construct; identical to SEQ ID NO: 1431
  REGION 1..116: note = Synthetic

SEQ ID NO: 1688 - protein, 44 aa, synthetic construct; identical to SEQ ID NO: 1424
  REGION 1..44: note = Synthetic

SEQ ID NO: 1689 - protein, 116 aa, synthetic construct; identical to SEQ ID NO: 1433
  REGION 1..116: note = Synthetic

SEQ ID NO: 1690 - protein, 44 aa, synthetic construct; identical to SEQ ID NO: 1424
  REGION 1..44: note = Synthetic

SEQ ID NO: 1691 - protein, 116 aa, synthetic construct; identical to SEQ ID NO: 1435
  REGION 1..116: note = Synthetic

SEQ ID NO: 1692 - protein, 44 aa, synthetic construct; identical to SEQ ID NO: 1424
  REGION 1..44: note = Synthetic

SEQ ID NO: 1693 - protein, 116 aa, synthetic construct; identical to SEQ ID NO: 1437
  REGION 1..116: note = Synthetic

SEQ ID NO: 1694 - protein, 44 aa, synthetic construct; identical to SEQ ID NO: 1424
  REGION 1..44: note = Synthetic

SEQ ID NO: 1695 - protein, 116 aa, synthetic construct; identical to SEQ ID NO: 1423
  REGION 1..116: note = Synthetic

SEQ ID NO: 1696 - protein, 44 aa, synthetic construct; identical to SEQ ID NO: 1424
  REGION 1..44: note = Synthetic

SEQ ID NO: 1697 - protein, 116 aa, synthetic construct; identical to SEQ ID NO: 1425
  REGION 1..116: note = Synthetic

SEQ ID NO: 1698 - protein, 44 aa, synthetic construct; identical to SEQ ID NO: 1426
  REGION 1..44: note = Synthetic

SEQ ID NO: 1699 - protein, 116 aa, synthetic construct; identical to SEQ ID NO: 1425
  REGION 1..116: note = Synthetic

SEQ ID NO: 1700 - protein, 44 aa, synthetic construct; identical to SEQ ID NO: 1428
  REGION 1..44: note = Synthetic

SEQ ID NO: 1701 - protein, 116 aa, synthetic construct; identical to SEQ ID NO: 1429
  REGION 1..116: note = Synthetic

SEQ ID NO: 1702 - protein, 44 aa, synthetic construct; identical to SEQ ID NO: 1424
  REGION 1..44: note = Synthetic

SEQ ID NO: 1703 - protein, 116 aa, synthetic construct; identical to SEQ ID NO: 1431
  REGION 1..116: note = Synthetic

SEQ ID NO: 1704 - protein, 44 aa, synthetic construct; identical to SEQ ID NO: 1424
  REGION 1..44: note = Synthetic

SEQ ID NO: 1705 - protein, 116 aa, synthetic construct; identical to SEQ ID NO: 1433
  REGION 1..116: note = Synthetic

SEQ ID NO: 1706 - protein, 44 aa, synthetic construct; identical to SEQ ID NO: 1424
  REGION 1..44: note = Synthetic

SEQ ID NO: 1707 - protein, 116 aa, synthetic construct; identical to SEQ ID NO: 1435
  REGION 1..116: note = Synthetic

SEQ ID NO: 1708 - protein, 44 aa, synthetic construct; identical to SEQ ID NO: 1424
  REGION 1..44: note = Synthetic

SEQ ID NO: 1709 - protein, 116 aa, synthetic construct; identical to SEQ ID NO: 1437
  REGION 1..116: note = Synthetic

SEQ ID NO: 1710 - protein, 44 aa, synthetic construct; identical to SEQ ID NO: 1424
  REGION 1..44: note = Synthetic

SEQ ID NO: 1711 - protein, 116 aa, synthetic construct; identical to SEQ ID NO: 1423
  REGION 1..116: note = Synthetic

SEQ ID NO: 1712 - protein, 44 aa, synthetic construct; identical to SEQ ID NO: 1424
  REGION 1..44: note = Synthetic

SEQ ID NO: 1713 - protein, 116 aa, synthetic construct; identical to SEQ ID NO: 1425
  REGION 1..116: note = Synthetic

SEQ ID NO: 1714 - protein, 44 aa, synthetic construct; identical to SEQ ID NO: 1426
  REGION 1..44: note = Synthetic

SEQ ID NO: 1715 - protein, 116 aa, synthetic construct; identical to SEQ ID NO: 1425
  REGION 1..116: note = Synthetic

SEQ ID NO: 1716 - protein, 44 aa, synthetic construct; identical to SEQ ID NO: 1428
  REGION 1..44: note = Synthetic

SEQ ID NO: 1717 - protein, 116 aa, synthetic construct; identical to SEQ ID NO: 1429
  REGION 1..116: note = Synthetic

SEQ ID NO: 1718 - protein, 44 aa, synthetic construct; identical to SEQ ID NO: 1424
  REGION 1..44: note = Synthetic

SEQ ID NO: 1719 - protein, 116 aa, synthetic construct; identical to SEQ ID NO: 1431
  REGION 1..116: note = Synthetic

SEQ ID NO: 1720 - protein, 44 aa, synthetic construct; identical to SEQ ID NO: 1424
  REGION 1..44: note = Synthetic

SEQ ID NO: 1721 - protein, 116 aa, synthetic construct; identical to SEQ ID NO: 1433
  REGION 1..116: note = Synthetic

SEQ ID NO: 1722 - protein, 44 aa, synthetic construct; identical to SEQ ID NO: 1424
  REGION 1..44: note = Synthetic

SEQ ID NO: 1723 - protein, 116 aa, synthetic construct; identical to SEQ ID NO: 1435
  REGION 1..116: note = Synthetic

SEQ ID NO: 1724 - protein, 44 aa, synthetic construct; identical to SEQ ID NO: 1424
  REGION 1..44: note = Synthetic

SEQ ID NO: 1725 - protein, 116 aa, synthetic construct; identical to SEQ ID NO: 1437
  REGION 1..116: note = Synthetic

SEQ ID NO: 1726 - protein, 44 aa, synthetic construct; identical to SEQ ID NO: 1424
  REGION 1..44: note = Synthetic

SEQ ID NO: 1727 - protein, 116 aa, synthetic construct; identical to SEQ ID NO: 1423
  REGION 1..116: note = Synthetic

SEQ ID NO: 1728 - protein, 44 aa, synthetic construct; identical to SEQ ID NO: 1424
  REGION 1..44: note = Synthetic

SEQ ID NO: 1729 - protein, 116 aa, synthetic construct; identical to SEQ ID NO: 1425
  REGION 1..116: note = Synthetic

SEQ ID NO: 1730 - protein, 44 aa, synthetic construct; identical to SEQ ID NO: 1426
  REGION 1..44: note = Synthetic

SEQ ID NO: 1731 - protein, 116 aa, synthetic construct; identical to SEQ ID NO: 1425
  REGION 1..116: note = Synthetic

SEQ ID NO: 1732 - protein, 44 aa, synthetic construct; identical to SEQ ID NO: 1428
  REGION 1..44: note = Synthetic

SEQ ID NO: 1733 - protein, 116 aa, synthetic construct; identical to SEQ ID NO: 1429
  REGION 1..116: note = Synthetic

SEQ ID NO: 1734 - protein, 44 aa, synthetic construct; identical to SEQ ID NO: 1424
  REGION 1..44: note = Synthetic

SEQ ID NO: 1735 - protein, 116 aa, synthetic construct; identical to SEQ ID NO: 1431
  REGION 1..116: note = Synthetic

SEQ ID NO: 1736 - protein, 44 aa, synthetic construct; identical to SEQ ID NO: 1424
  REGION 1..44: note = Synthetic

SEQ ID NO: 1737 - protein, 116 aa, synthetic construct; identical to SEQ ID NO: 1433
  REGION 1..116: note = Synthetic

SEQ ID NO: 1738 - protein, 44 aa, synthetic construct; identical to SEQ ID NO: 1424
  REGION 1..44: note = Synthetic

SEQ ID NO: 1739 - protein, 116 aa, synthetic construct; identical to SEQ ID NO: 1435
  REGION 1..116: note = Synthetic

SEQ ID NO: 1740 - protein, 44 aa, synthetic construct; identical to SEQ ID NO: 1424
  REGION 1..44: note = Synthetic

SEQ ID NO: 1741 - protein, 116 aa, synthetic construct; identical to SEQ ID NO: 1437
  REGION 1..116: note = Synthetic

SEQ ID NO: 1742 - protein, 44 aa, synthetic construct; identical to SEQ ID NO: 1424
  REGION 1..44: note = Synthetic

SEQ ID NO: 1743 - protein, 116 aa, synthetic construct; identical to SEQ ID NO: 1423
  REGION 1..116: note = Synthetic

SEQ ID NO: 1744 - protein, 44 aa, synthetic construct; identical to SEQ ID NO: 1424
  REGION 1..44: note = Synthetic

SEQ ID NO: 1745 - protein, 116 aa, synthetic construct; identical to SEQ ID NO: 1433
  REGION 1..116: note = Synthetic

SEQ ID NO: 1746 - protein, 116 aa, synthetic construct; identical to SEQ ID NO: 1425
  REGION 1..116: note = Synthetic

SEQ ID NO: 1747 - protein, 44 aa, synthetic construct; identical to SEQ ID NO: 1426
  REGION 1..44: note = Synthetic

SEQ ID NO: 1748 - protein, 116 aa, synthetic construct; identical to SEQ ID NO: 1429
  REGION 1..116: note = Synthetic

SEQ ID NO: 1749 - protein, 44 aa, synthetic construct; identical to SEQ ID NO: 1424
  REGION 1..44: note = Synthetic

SEQ ID NO: 1750 - protein, 116 aa, synthetic construct; identical to SEQ ID NO: 1425
  REGION 1..116: note = Synthetic

SEQ ID NO: 1751 - protein, 44 aa, synthetic construct; identical to SEQ ID NO: 1428
  REGION 1..44: note = Synthetic

SEQ ID NO: 1752 - protein, 116 aa, synthetic construct; identical to SEQ ID NO: 1423
  REGION 1..116: note = Synthetic

SEQ ID NO: 1753 - protein, 44 aa, synthetic construct; identical to SEQ ID NO: 1424
  REGION 1..44: note = Synthetic

SEQ ID NO: 1754 - protein, 116 aa, synthetic construct; identical to SEQ ID NO: 1429
  REGION 1..116: note = Synthetic

SEQ ID NO: 1755 - protein, 44 aa, synthetic construct; identical to SEQ ID NO: 1424
  REGION 1..44: note = Synthetic

SEQ ID NO: 1756 - protein, 116 aa, synthetic construct; identical to SEQ ID NO: 1437
  REGION 1..116: note = Synthetic

SEQ ID NO: 1757 - protein, 116 aa, synthetic construct; identical to SEQ ID NO: 1431
  REGION 1..116: note = Synthetic

SEQ ID NO: 1758 - protein, 44 aa, synthetic construct; identical to SEQ ID NO: 1424
  REGION 1..44: note = Synthetic

SEQ ID NO: 1759 - protein, 116 aa, synthetic construct; identical to SEQ ID NO: 1425
  REGION 1..116: note = Synthetic

SEQ ID NO: 1760 - protein, 44 aa, synthetic construct; identical to SEQ ID NO: 1426
  REGION 1..44: note = Synthetic

SEQ ID NO: 1761 - protein, 116 aa, synthetic construct; identical to SEQ ID NO: 1433
  REGION 1..116: note = Synthetic

SEQ ID NO: 1762 - protein, 44 aa, synthetic construct; identical to SEQ ID NO: 1424
  REGION 1..44: note = Synthetic

SEQ ID NO: 1763 - protein, 116 aa, synthetic construct; identical to SEQ ID NO: 1435
  REGION 1..116: note = Synthetic

SEQ ID NO: 1764 - protein, 116 aa, synthetic construct; identical to SEQ ID NO: 1435
  REGION 1..116: note = Synthetic

SEQ ID NO: 1765 - protein, 44 aa, synthetic construct; identical to SEQ ID NO: 1424
  REGION 1..44: note = Synthetic

SEQ ID NO: 1766 - protein, 116 aa, synthetic construct; identical to SEQ ID NO: 1431
  REGION 1..116: note = Synthetic

SEQ ID NO: 1767 - protein, 116 aa, synthetic construct; identical to SEQ ID NO: 1437
  REGION 1..116: note = Synthetic

SEQ ID NO: 1768 - protein, 44 aa, synthetic construct; identical to SEQ ID NO: 1424
  REGION 1..44: note = Synthetic

SEQ ID NO: 1769 - protein, 116 aa, synthetic construct; identical to SEQ ID NO: 1425
  REGION 1..116: note = Synthetic

SEQ ID NO: 1770 - protein, 44 aa, synthetic construct; identical to SEQ ID NO: 1428
  REGION 1..44: note = Synthetic

SEQ ID NO: 1771 - protein, 116 aa, synthetic construct; identical to SEQ ID NO: 1423
  REGION 1..116: note = Synthetic

SEQ ID NO: 1772 - protein, 44 aa, synthetic construct; identical to SEQ ID NO: 1424
  REGION 1..44: note = Synthetic

SEQ ID NO: 1773 - protein, 116 aa, synthetic construct; identical to SEQ ID NO: 1425
  REGION 1..116: note = Synthetic

SEQ ID NO: 1774 - protein, 44 aa, synthetic construct; identical to SEQ ID NO: 1426
  REGION 1..44: note = Synthetic

SEQ ID NO: 1775 - protein, 116 aa, synthetic construct; identical to SEQ ID NO: 1425
  REGION 1..116: note = Synthetic

SEQ ID NO: 1776 - protein, 44 aa, synthetic construct; identical to SEQ ID NO: 1428
  REGION 1..44: note = Synthetic

SEQ ID NO: 1777 - protein, 116 aa, synthetic construct; identical to SEQ ID NO: 1429
  REGION 1..116: note = Synthetic

SEQ ID NO: 1778 - protein, 44 aa, synthetic construct; identical to SEQ ID NO: 1424
  REGION 1..44: note = Synthetic

SEQ ID NO: 1779 - protein, 116 aa, synthetic construct; identical to SEQ ID NO: 1431
  REGION 1..116: note = Synthetic

SEQ ID NO: 1780 - protein, 44 aa, synthetic construct; identical to SEQ ID NO: 1424
  REGION 1..44: note = Synthetic

SEQ ID NO: 1781 - protein, 116 aa, synthetic construct; identical to SEQ ID NO: 1433
  REGION 1..116: note = Synthetic

SEQ ID NO: 1782 - protein, 44 aa, synthetic construct; identical to SEQ ID NO: 1424
  REGION 1..44: note = Synthetic

SEQ ID NO: 1783 - protein, 116 aa, synthetic construct; identical to SEQ ID NO: 1435
  REGION 1..116: note = Synthetic

SEQ ID NO: 1784 - protein, 44 aa, synthetic construct; identical to SEQ ID NO: 1424
  REGION 1..44: note = Synthetic

SEQ ID NO: 1785 - protein, 116 aa, synthetic construct; identical to SEQ ID NO: 1437
  REGION 1..116: note = Synthetic

SEQ ID NO: 1786 - protein, 44 aa, synthetic construct; identical to SEQ ID NO: 1424
  REGION 1..44: note = Synthetic

SEQ ID NO: 1787 - protein, 116 aa, synthetic construct; identical to SEQ ID NO: 1423
  REGION 1..116: note = Synthetic

SEQ ID NO: 1788 - protein, 44 aa, synthetic construct; identical to SEQ ID NO: 1424
  REGION 1..44: note = Synthetic

SEQ ID NO: 1789 - protein, 116 aa, synthetic construct; identical to SEQ ID NO: 1425
  REGION 1..116: note = Synthetic

SEQ ID NO: 1790 - protein, 44 aa, synthetic construct; identical to SEQ ID NO: 1426
  REGION 1..44: note = Synthetic

SEQ ID NO: 1791 - protein, 116 aa, synthetic construct; identical to SEQ ID NO: 1425
  REGION 1..116: note = Synthetic

SEQ ID NO: 1792 - protein, 44 aa, synthetic construct; identical to SEQ ID NO: 1428
  REGION 1..44: note = Synthetic

SEQ ID NO: 1793 - protein, 116 aa, synthetic construct; identical to SEQ ID NO: 1429
  REGION 1..116: note = Synthetic

SEQ ID NO: 1794 - protein, 44 aa, synthetic construct; identical to SEQ ID NO: 1424
  REGION 1..44: note = Synthetic

SEQ ID NO: 1795 - protein, 116 aa, synthetic construct; identical to SEQ ID NO: 1431
  REGION 1..116: note = Synthetic

SEQ ID NO: 1796 - protein, 44 aa, synthetic construct; identical to SEQ ID NO: 1424
  REGION 1..44: note = Synthetic

SEQ ID NO: 1797 - protein, 116 aa, synthetic construct; identical to SEQ ID NO: 1433
  REGION 1..116: note = Synthetic

SEQ ID NO: 1798 - protein, 44 aa, synthetic construct; identical to SEQ ID NO: 1424
  REGION 1..44: note = Synthetic

SEQ ID NO: 1799 - protein, 116 aa, synthetic construct; identical to SEQ ID NO: 1435
  REGION 1..116: note = Synthetic

SEQ ID NO: 1800 - protein, 44 aa, synthetic construct; identical to SEQ ID NO: 1424
  REGION 1..44: note = Synthetic

SEQ ID NO: 1801 - protein, 116 aa, synthetic construct; identical to SEQ ID NO: 1437
  REGION 1..116: note = Synthetic

SEQ ID NO: 1802 - protein, 44 aa, synthetic construct; identical to SEQ ID NO: 1424
  REGION 1..44: note = Synthetic

SEQ ID NO: 1803 - protein, 116 aa, synthetic construct; identical to SEQ ID NO: 1423
  REGION 1..116: note = Synthetic

SEQ ID NO: 1804 - protein, 44 aa, synthetic construct; identical to SEQ ID NO: 1424
  REGION 1..44: note = Synthetic

SEQ ID NO: 1805 - protein, 116 aa, synthetic construct; identical to SEQ ID NO: 1425
  REGION 1..116: note = Synthetic

SEQ ID NO: 1806 - protein, 44 aa, synthetic construct; identical to SEQ ID NO: 1426
  REGION 1..44: note = Synthetic

SEQ ID NO: 1807 - protein, 116 aa, synthetic construct; identical to SEQ ID NO: 1425
  REGION 1..116: note = Synthetic

SEQ ID NO: 1808 - protein, 44 aa, synthetic construct; identical to SEQ ID NO: 1428
  REGION 1..44: note = Synthetic

SEQ ID NO: 1809 - protein, 116 aa, synthetic construct; identical to SEQ ID NO: 1429
  REGION 1..116: note = Synthetic

SEQ ID NO: 1810 - protein, 44 aa, synthetic construct; identical to SEQ ID NO: 1424
  REGION 1..44: note = Synthetic

SEQ ID NO: 1811 - protein, 116 aa, synthetic construct; identical to SEQ ID NO: 1431
  REGION 1..116: note = Synthetic

SEQ ID NO: 1812 - protein, 44 aa, synthetic construct; identical to SEQ ID NO: 1424
  REGION 1..44: note = Synthetic

SEQ ID NO: 1813 - protein, 116 aa, synthetic construct; identical to SEQ ID NO: 1433
  REGION 1..116: note = Synthetic

SEQ ID NO: 1814 - protein, 44 aa, synthetic construct; identical to SEQ ID NO: 1424
  REGION 1..44: note = Synthetic

SEQ ID NO: 1815 - protein, 116 aa, synthetic construct; identical to SEQ ID NO: 1435
  REGION 1..116: note = Synthetic

SEQ ID NO: 1816 - protein, 44 aa, synthetic construct; identical to SEQ ID NO: 1424
  REGION 1..44: note = Synthetic

SEQ ID NO: 1817 - protein, 116 aa, synthetic construct; identical to SEQ ID NO: 1437
  REGION 1..116: note = Synthetic

SEQ ID NO: 1818 - protein, 44 aa, synthetic construct; identical to SEQ ID NO: 1424
  REGION 1..44: note = Synthetic

SEQ ID NO: 1819 - protein, 116 aa, synthetic construct; identical to SEQ ID NO: 1423
  REGION 1..116: note = Synthetic

SEQ ID NO: 1820 - protein, 44 aa, synthetic construct; identical to SEQ ID NO: 1424
  REGION 1..44: note = Synthetic

SEQ ID NO: 1821 - protein, 116 aa, synthetic construct; identical to SEQ ID NO: 1425
  REGION 1..116: note = Synthetic

SEQ ID NO: 1822 - protein, 44 aa, synthetic construct; identical to SEQ ID NO: 1426
  REGION 1..44: note = Synthetic

SEQ ID NO: 1823 - protein, 116 aa, synthetic construct; identical to SEQ ID NO: 1425
  REGION 1..116: note = Synthetic

SEQ ID NO: 1824 - protein, 44 aa, synthetic construct; identical to SEQ ID NO: 1428
  REGION 1..44: note = Synthetic

SEQ ID NO: 1825 - protein, 116 aa, synthetic construct; identical to SEQ ID NO: 1429
  REGION 1..116: note = Synthetic

SEQ ID NO: 1826 - protein, 44 aa, synthetic construct; identical to SEQ ID NO: 1424
  REGION 1..44: note = Synthetic

SEQ ID NO: 1827 - protein, 116 aa, synthetic construct; identical to SEQ ID NO: 1431
  REGION 1..116: note = Synthetic

SEQ ID NO: 1828 - protein, 44 aa, synthetic construct; identical to SEQ ID NO: 1424
  REGION 1..44: note = Synthetic

SEQ ID NO: 1829 - protein, 116 aa, synthetic construct; identical to SEQ ID NO: 1433
  REGION 1..116: note = Synthetic

SEQ ID NO: 1830 - protein, 44 aa, synthetic construct; identical to SEQ ID NO: 1424
  REGION 1..44: note = Synthetic

SEQ ID NO: 1831 - protein, 116 aa, synthetic construct; identical to SEQ ID NO: 1435
  REGION 1..116: note = Synthetic

SEQ ID NO: 1832 - protein, 44 aa, synthetic construct; identical to SEQ ID NO: 1424
  REGION 1..44: note = Synthetic

SEQ ID NO: 1833 - protein, 116 aa, synthetic construct; identical to SEQ ID NO: 1437
  REGION 1..116: note = Synthetic

SEQ ID NO: 1834 - protein, 44 aa, synthetic construct; identical to SEQ ID NO: 1424
  REGION 1..44: note = Synthetic

SEQ ID NO: 1835 - protein, 116 aa, synthetic construct; identical to SEQ ID NO: 1423
  REGION 1..116: note = Synthetic

SEQ ID NO: 1836 - protein, 44 aa, synthetic construct; identical to SEQ ID NO: 1424
  REGION 1..44: note = Synthetic

SEQ ID NO: 1837 - protein, 116 aa, synthetic construct; identical to SEQ ID NO: 1425
  REGION 1..116: note = Synthetic

SEQ ID NO: 1838 - protein, 44 aa, synthetic construct; identical to SEQ ID NO: 1426
  REGION 1..44: note = Synthetic

SEQ ID NO: 1839 - protein, 116 aa, synthetic construct; identical to SEQ ID NO: 1425
  REGION 1..116: note = Synthetic

SEQ ID NO: 1840 - protein, 44 aa, synthetic construct; identical to SEQ ID NO: 1428
  REGION 1..44: note = Synthetic

SEQ ID NO: 1841 - protein, 116 aa, synthetic construct; identical to SEQ ID NO: 1429
  REGION 1..116: note = Synthetic

SEQ ID NO: 1842 - protein, 44 aa, synthetic construct; identical to SEQ ID NO: 1424
  REGION 1..44: note = Synthetic

SEQ ID NO: 1843 - protein, 116 aa, synthetic construct; identical to SEQ ID NO: 1431
  REGION 1..116: note = Synthetic

SEQ ID NO: 1844 - protein, 44 aa, synthetic construct; identical to SEQ ID NO: 1424
  REGION 1..44: note = Synthetic

SEQ ID NO: 1845 - protein, 116 aa, synthetic construct; identical to SEQ ID NO: 1433
  REGION 1..116: note = Synthetic

SEQ ID NO: 1846 - protein, 44 aa, synthetic construct; identical to SEQ ID NO: 1424
  REGION 1..44: note = Synthetic

SEQ ID NO: 1847 - protein, 116 aa, synthetic construct; identical to SEQ ID NO: 1435
  REGION 1..116: note = Synthetic

SEQ ID NO: 1848 - protein, 44 aa, synthetic construct; identical to SEQ ID NO: 1424
  REGION 1..44: note = Synthetic

SEQ ID NO: 1849 - protein, 116 aa, synthetic construct; identical to SEQ ID NO: 1437
  REGION 1..116: note = Synthetic

SEQ ID NO: 1850 - protein, 44 aa, synthetic construct; identical to SEQ ID NO: 1424
  REGION 1..44: note = Synthetic

SEQ ID NO: 1851 - protein, 116 aa, synthetic construct; identical to SEQ ID NO: 1423
  REGION 1..116: note = Synthetic

SEQ ID NO: 1852 - protein, 44 aa, synthetic construct; identical to SEQ ID NO: 1424
  REGION 1..44: note = Synthetic

SEQ ID NO: 1853 - protein, 116 aa, synthetic construct; identical to SEQ ID NO: 1425
  REGION 1..116: note = Synthetic

SEQ ID NO: 1854 - protein, 44 aa, synthetic construct; identical to SEQ ID NO: 1426
  REGION 1..44: note = Synthetic

SEQ ID NO: 1855 - protein, 116 aa, synthetic construct; identical to SEQ ID NO: 1425
  REGION 1..116: note = Synthetic

SEQ ID NO: 1856 - protein, 44 aa, synthetic construct; identical to SEQ ID NO: 1428
  REGION 1..44: note = Synthetic

SEQ ID NO: 1857 - protein, 116 aa, synthetic construct; identical to SEQ ID NO: 1429
  REGION 1..116: note = Synthetic

SEQ ID NO: 1858 - protein, 44 aa, synthetic construct; identical to SEQ ID NO: 1424
  REGION 1..44: note = Synthetic

SEQ ID NO: 1859 - protein, 116 aa, synthetic construct; identical to SEQ ID NO: 1431
  REGION 1..116: note = Synthetic

SEQ ID NO: 1860 - protein, 44 aa, synthetic construct; identical to SEQ ID NO: 1424
  REGION 1..44: note = Synthetic

SEQ ID NO: 1861 - protein, 116 aa, synthetic construct; identical to SEQ ID NO: 1433
  REGION 1..116: note = Synthetic

SEQ ID NO: 1862 - protein, 44 aa, synthetic construct; identical to SEQ ID NO: 1424
  REGION 1..44: note = Synthetic

SEQ ID NO: 1863 - protein, 116 aa, synthetic construct; identical to SEQ ID NO: 1435
  REGION 1..116: note = Synthetic

SEQ ID NO: 1864 - protein, 44 aa, synthetic construct; identical to SEQ ID NO: 1424
  REGION 1..44: note = Synthetic

SEQ ID NO: 1865 - protein, 116 aa, synthetic construct; identical to SEQ ID NO: 1437
  REGION 1..116: note = Synthetic

SEQ ID NO: 1866 - protein, 44 aa, synthetic construct; identical to SEQ ID NO: 1424
  REGION 1..44: note = Synthetic

SEQ ID NO: 1867 - protein, 116 aa, synthetic construct; identical to SEQ ID NO: 1423
  REGION 1..116: note = Synthetic

SEQ ID NO: 1868 - protein, 44 aa, synthetic construct; identical to SEQ ID NO: 1424
  REGION 1..44: note = Synthetic

SEQ ID NO: 1869 - protein, 116 aa, synthetic construct; identical to SEQ ID NO: 1425
  REGION 1..116: note = Synthetic

SEQ ID NO: 1870 - protein, 44 aa, synthetic construct; identical to SEQ ID NO: 1426
  REGION 1..44: note = Synthetic

SEQ ID NO: 1871 - protein, 116 aa, synthetic construct; identical to SEQ ID NO: 1425
  REGION 1..116: note = Synthetic

SEQ ID NO: 1872 - protein, 44 aa, synthetic construct; identical to SEQ ID NO: 1428
  REGION 1..44: note = Synthetic

SEQ ID NO: 1873 - protein, 116 aa, synthetic construct; identical to SEQ ID NO: 1429
  REGION 1..116: note = Synthetic

SEQ ID NO: 1874 - protein, 44 aa, synthetic construct; identical to SEQ ID NO: 1424
  REGION 1..44: note = Synthetic

SEQ ID NO: 1875 - protein, 116 aa, synthetic construct; identical to SEQ ID NO: 1431
  REGION 1..116: note = Synthetic

SEQ ID NO: 1876 - protein, 44 aa, synthetic construct; identical to SEQ ID NO: 1424
  REGION 1..44: note = Synthetic

SEQ ID NO: 1877 - protein, 116 aa, synthetic construct; identical to SEQ ID NO: 1433
  REGION 1..116: note = Synthetic

SEQ ID NO: 1878 - protein, 44 aa, synthetic construct; identical to SEQ ID NO: 1424
  REGION 1..44: note = Synthetic

SEQ ID NO: 1879 - protein, 116 aa, synthetic construct; identical to SEQ ID NO: 1435
  REGION 1..116: note = Synthetic

SEQ ID NO: 1880 - protein, 44 aa, synthetic construct; identical to SEQ ID NO: 1424
  REGION 1..44: note = Synthetic

SEQ ID NO: 1881 - protein, 116 aa, synthetic construct; identical to SEQ ID NO: 1437
  REGION 1..116: note = Synthetic

SEQ ID NO: 1882 - protein, 44 aa, synthetic construct; identical to SEQ ID NO: 1424
  REGION 1..44: note = Synthetic

SEQ ID NO: 1883 - protein, 449 aa, synthetic construct
  REGION 1..449: note = Synthetic
EVQVLESGGGLVQPGESLRLSCTASGFTFNAYAMSWVRQAPGKGLEWVSTISGSGSTTYYADSVKGRFTISRDNSKNTLDLQMNSLRAADTAVYYCAKVAGSNFFFDHWGQGTLVTVSSASTKGPSVFPLAPSSKSTSGGTAALGCLVKDYFPEPVTVSWNSGALTSGVHTFPAVLQSSGLYSLSSVVTVPSSSLGTQTYICNVNHKPSNTKVDKKVEPKSCDKTHTCPPCPAPELLGGPSVFLFPPKPKDTLMISRTPEVTCVVVDVSHEDPEVKFNWYVDGVEVHNAKTKPCEEQYGSTYRCVSVLTVLHQDWLNGKEYKCKVSNKALPAPIEKTISKAKGQPREPQVYTLPPSREEMTKNQVSLTCLVKGFYPSDIAVEWESNGQPENNYKTTPPVLDSDGSFFLYSKLTVDKSRWQQGNVFSCSVMHEALHNHYTQKSLSLSPGK

SEQ ID NO: 1884 - DNA, 1416 bp, synthetic construct
  misc_feature 1..1416: note = Synthetic
  source 1..1416: mol_type = other DNA
atggacatgagggtgcccgctcagctcctggggctcctgctgctgtggctgagaggtgcgcgctgtgaggtgcaggtgttggagtctgggggaggcttggtacagcctggggagtccctgagactctcctgtacagcctctggattcacctttaacgcctatgccatgagctgggtccgccaggctccagggaaggggctggagtgggtgtcaactattagtggtagtggtagtaccacatactacgcagactccgtgaagggccggttcaccatctccagagacaattccaagaacacgctggatctgcaaatgaacagcctgagagccgcggacacggccgtatattactgtgcgaaagttgctggaagtaactttttctttgaccactggggccagggaaccctggttaccgtgtcctcagcctccaccaagggcccatcggtcttccccctggcaccctcctccaagagcacctctgggggcacagcggccctgggctgcctggtcaaggactacttccccgaaccggtgacggtgtcgtggaactcaggcgccctgaccagcggcgtgcacaccttcccggctgtcctacagtcctcaggactctactccctcagcagcgtggtgaccgtgccctccagcagcttgggcacccagacctacatctgcaacgtgaatcacaagcccagcaacaccaaggtggacaagaaagttgagcccaaatcttgtgacaaaactcacacatgcccaccgtgcccagcacctgaactcctggggggaccgtcagtcttcctcttccccccaaaacccaaggacaccctcatgatctcccggacccctgaggtcacatgcgtggtggtggacgtgagccacgaagaccctgaggtcaagttcaactggtacgtggacggcgtggaggtgcataatgccaagacaaagccgtgcgaggagcagtacggcagcacgtaccgttgcgtcagcgtcctcaccgtcctgcaccaggactggctgaatggcaaggagtacaagtgcaaggtgtccaacaaagccctcccagcccccatcgagaaaaccatctccaaagccaaagggcagccccgagaaccacaggtgtacaccctgcccccatcccgggaggagatgaccaagaaccaggtcagcctgacctgcctggtcaaaggcttctatcccagcgacatcgccgtggagtgggagagcaatgggcagccggagaacaactacaagaccacgcctcccgtgctggactccgacggctccttcttcctctatagcaagctcaccgtggacaagagcaggtggcagcaggggaacgtcttctcatgctccgtgatgcatgaggctctgcacaaccactacacgcagaagagcctctccctgtctccgggcaaatag

SEQ ID NO: 1885 - protein, 452 aa, synthetic construct
  REGION 1..452: note = Synthetic
QVQLVQSGAEVKKPGASVKVSCKASGYTFTRYDINWVRQATGQGLEWMGWMNPNSGNSGSVQKFRGRVTMTRDTSIHIAYMELSSLRSEDTAVYYCARGGYTSSWRWYFDLWGRGTLVTVSSASTKGPSVFPLAPSSKSTSGGTAALGCLVKDYFPEPVTVSWNSGALTSGVHTFPAVLQSSGLYSLSSVVTVPSSSLGTQTYICNVNHKPSNTKVDKKVEPKSCDKTHTCPPCPAPELLGGPSVFLFPPKPKDTLMISRTPEVTCVVVDVSHEDPEVKFNWYVDGVEVHNAKTKPCEEQYGSTYRCVSVLTVLHQDWLNGKEYKCKVSNKALPAPIEKTISKAKGQPREPQVYTLPPSREEMTKNQVSLTCLVKGFYPSDIAVEWESNGQPENNYKTTPPVLDSDGSFFLYSKLTVDKSRWQQGNVFSCSVMHEALHNHYTQKSLSLSPGK

SEQ ID NO: 1886 - DNA, 1425 bp, synthetic construct
  misc_feature 1..1425: note = Synthetic
  source 1..1425: mol_type = other DNA
atggacatgagggtgcccgctcagctcctggggctcctgctgctgtggctgagaggtgcgcgctgtcaggtgcagctggtgcagtctggggctgaggtgaagaagcctggggcctcagtgaaggtgtcctgcaaggcttctggatacaccttcaccagatatgatatcaactgggtgcgacaggccactggacaaggacttgagtggatgggatggatgaaccctaacagtggtaactcaggctctgtacagaagttccggggcagagtcaccatgaccagggacacctccatccacatcgcctacatggaactgagcagcctgagatctgaggacacggccgtgtattactgtgcgagaggcgggtataccagcagctggcggtggtacttcgatctctggggccgtggcaccctggtcactgtctcctcagcctccaccaagggcccatcggtcttccccctggcaccctcctccaagagcacctctgggggcacagcggccctgggctgcctggtcaaggactacttccccgaaccggtgacggtgtcgtggaactcaggcgccctgaccagcggcgtgcacaccttcccggctgtcctacagtcctcaggactctactccctcagcagcgtggtgaccgtgccctccagcagcttgggcacccagacctacatctgcaacgtgaatcacaagcccagcaacaccaaggtggacaagaaagttgagcccaaatcttgtgacaaaactcacacatgcccaccgtgcccagcacctgaactcctggggggaccgtcagtcttcctcttccccccaaaacccaaggacaccctcatgatctcccggacccctgaggtcacatgcgtggtggtggacgtgagccacgaagaccctgaggtcaagttcaactggtacgtggacggcgtggaggtgcataatgccaagacaaagccgtgcgaggagcagtacggcagcacgtaccgttgcgtcagcgtcctcaccgtcctgcaccaggactggctgaatggcaaggagtacaagtgcaaggtgtccaacaaagccctcccagcccccatcgagaaaaccatctccaaagccaaagggcagccccgagaaccacaggtgtacaccctgcccccatcccgggaggagatgaccaagaaccaggtcagcctgacctgcctggtcaaaggcttctatcccagcgacatcgccgtggagtgggagagcaatgggcagccggagaacaactacaagaccacgcctcccgtgctggactccgacggctccttcttcctctatagcaagctcaccgtggacaagagcaggtggcagcaggggaacgtcttctcatgctccgtgatgcatgaggctctgcacaaccactacacgcagaagagcctctccctgtctccgggcaaatag

SEQ ID NO: 1887 - protein, 451 aa, synthetic construct
  REGION 1..451: note = Synthetic
QVQLVQSGAEVKKPGASVKVSCKASGYTFNGYYIHWVRQAPGQGLEWMGWLNPNSGGANYAQKFQGWVTMTRDTSISTAYMELSRLTSDDTAVYYCARDQRKTTVTPFEYWGQGTLVTVSSASTKGPSVFPLAPSSKSTSGGTAALGCLVKDYFPEPVTVSWNSGALTSGVHTFPAVLQSSGLYSLSSVVTVPSSSLGTQTYICNVNHKPSNTKVDKKVEPKSCDKTHTCPPCPAPELLGGPSVFLFPPKPKDTLMISRTPEVTCVVVDVSHEDPEVKFNWYVDGVEVHNAKTKPCEEQYGSTYRCVSVLTVLHQDWLNGKEYKCKVSNKALPAPIEKTISKAKGQPREPQVYTLPPSREEMTKNQVSLTCLVKGFYPSDIAVEWESNGQPENNYKTTPPVLDSDGSFFLYSKLTVDKSRWQQGNVFSCSVMHEALHNHYTQKSLSLSPGK

SEQ ID NO: 1888 - DNA, 1422 bp, synthetic construct
  misc_feature 1..1422: note = Synthetic
  source 1..1422: mol_type = other DNA
atggacatgagggtgcccgctcagctcctggggctcctgctgctgtggctgagaggtgcgcgctgtcaggtgcagctggtgcagtctggggctgaggtgaagaagcctggggcctcagtgaaggtgtcctgcaaggcttctggatacaccttcaacggctactatatccactgggtgcgacaggcccctggacaagggcttgagtggatgggatggctcaacccaaacagtggtggcgcaaactatgcacagaagtttcagggctgggtcaccatgaccagggacacgtccatcagcacagcctacatggagctgagcaggctgacatctgacgacacggccgtgtattactgtgcgagagatcagaggaagaccacggtgactccctttgagtactggggccagggaaccctggtcaccgtgtcctcagcctccaccaagggcccatcggtcttccccctggcaccctcctccaagagcacctctgggggcacagcggccctgggctgcctggtcaaggactacttccccgaaccggtgacggtgtcgtggaactcaggcgccctgaccagcggcgtgcacaccttcccggctgtcctacagtcctcaggactctactccctcagcagcgtggtgaccgtgccctccagcagcttgggcacccagacctacatctgcaacgtgaatcacaagcccagcaacaccaaggtggacaagaaagttgagcccaaatcttgtgacaaaactcacacatgcccaccgtgcccagcacctgaactcctggggggaccgtcagtcttcctcttccccccaaaacccaaggacaccctcatgatctcccggacccctgaggtcacatgcgtggtggtggacgtgagccacgaagaccctgaggtcaagttcaactggtacgtggacggcgtggaggtgcataatgccaagacaaagccgtgcgaggagcagtacggcagcacgtaccgttgcgtcagcgtcctcaccgtcctgcaccaggactggctgaatggcaaggagtacaagtgcaaggtgtccaacaaagccctcccagcccccatcgagaaaaccatctccaaagccaaagggcagccccgagaaccacaggtgtacaccctgcccccatcccgggaggagatgaccaagaaccaggtcagcctgacctgcctggtcaaaggcttctatcccagcgacatcgccgtggagtgggagagcaatgggcagccggagaacaactacaagaccacgcctcccgtgctggactccgacggctccttcttcctctatagcaagctcaccgtggacaagagcaggtggcagcaggggaacgtcttctcatgctccgtgatgcatgaggctctgcacaaccactacacgcagaagagcctctccctgtctccgggcaaatag

SEQ ID NO: 1889 - protein, 449 aa, synthetic construct
  REGION 1..449: note = Synthetic
EVQLLESGGGLVQPGGSLRLSCAASGFTFSTYAMNWVRQAPGKGLEWVSTVSGSGRPTYYADSVKGRFTISRDNSKNTLYLQMNSLRAEDTAVYYCAKAYYSNYLFDYWGQGTLVTVSSASTKGPSVFPLAPSSKSTSGGTAALGCLVKDYFPEPVTVSWNSGALTSGVHTFPAVLQSSGLYSLSSVVTVPSSSLGTQTYICNVNHKPSNTKVDKKVEPKSCDKTHTCPPCPAPELLGGPSVFLFPPKPKDTLMISRTPEVTCVVVDVSHEDPEVKFNWYVDGVEVHNAKTKPCEEQYGSTYRCVSVLTVLHQDWLNGKEYKCKVSNKALPAPIEKTISKAKGQPREPQVYTLPPSREEMTKNQVSLTCLVKGFYPSDIAVEWESNGQPENNYKTTPPVLDSDGSFFLYSKLTVDKSRWQQGNVFSCSVMHEALHNHYTQKSLSLSPGK

SEQ ID NO: 1890 - DNA, 1416 bp, synthetic construct
  misc_feature 1..1416: note = Synthetic
  source 1..1416: mol_type = other DNA
atggacatgagggtgcccgctcagctcctggggctcctgctgctgtggctgagaggtgcgcgctgtgaggtgcagctgttggagtctgggggaggcttggtacagcctggggggtccctgagactctcctgtgcagcctctggattcacctttagcacctatgccatgaactgggtccgccaggctccagggaaggggctggagtgggtgtcaactgttagtggtagtggtcgtcccacatactacgcagactccgtgaagggccggttcaccatctccagagacaattccaagaacacgctgtatctgcaaatgaacagcctgagagccgaggacacggccgtttattactgtgcgaaggcctactacagtaactacctttttgactactggggccagggaaccctggtcaccgtgtcctcagcctccaccaagggcccatcggtcttccccctggcaccctcctccaagagcacctctgggggcacagcggccctgggctgcctggtcaaggactacttccccgaaccggtgacggtgtcgtggaactcaggcgccctgaccagcggcgtgcacaccttcccggctgtcctacagtcctcaggactctactccctcagcagcgtggtgaccgtgccctccagcagcttgggcacccagacctacatctgcaacgtgaatcacaagcccagcaacaccaaggtggacaagaaagttgagcccaaatcttgtgacaaaactcacacatgcccaccgtgcccagcacctgaactcctggggggaccgtcagtcttcctcttccccccaaaacccaaggacaccctcatgatctcccggacccctgaggtcacatgcgtggtggtggacgtgagccacgaagaccctgaggtcaagttcaactggtacgtggacggcgtggaggtgcataatgccaagacaaagccgtgcgaggagcagtacggcagcacgtaccgttgcgtcagcgtcctcaccgtcctgcaccaggactggctgaatggcaaggagtacaagtgcaaggtgtccaacaaagccctcccagcccccatcgagaaaaccatctccaaagccaaagggcagccccgagaaccacaggtgtacaccctgcccccatcccgggaggagatgaccaagaaccaggtcagcctgacctgcctggtcaaaggcttctatcccagcgacatcgccgtggagtgggagagcaatgggcagccggagaacaactacaagaccacgcctcccgtgctggactccgacggctccttcttcctctatagcaagctcaccgtggacaagagcaggtggcagcaggggaacgtcttctcatgctccgtgatgcatgaggctctgcacaaccactacacgcagaagagcctctccctgtctccgggcaaatag

SEQ ID NO: 1891 - protein, 449 aa, synthetic construct
  REGION 1..449: note = Synthetic
EVQLLESGGGMVQPGGSLRLSCAVSGFTFSRYAMSWVRQAPGKGLEWVSEMRGSSGSTYYADSVKGRFTISRDNSKNTLYLQMNSLRVEDTAIYYCAKEFSSNSLFDYWGQGTLVTVSSASTKGPSVFPLAPSSKSTSGGTAALGCLVKDYFPEPVTVSWNSGALTSGVHTFPAVLQSSGLYSLSSVVTVPSSSLGTQTYICNVNHKPSNTKVDKKVEPKSCDKTHTCPPCPAPELLGGPSVFLFPPKPKDTLMISRTPEVTCVVVDVSHEDPEVKFNWYVDGVEVHNAKTKPCEEQYGSTYRCVSVLTVLHQDWLNGKEYKCKVSNKALPAPIEKTISKAKGQPREPQVYTLPPSREEMTKNQVSLTCLVKGFYPSDIAVEWESNGQPENNYKTTPPVLDSDGSFFLYSKLTVDKSRWQQGNVFSCSVMHEALHNHYTQKSLSLSPGK

SEQ ID NO: 1892 - DNA, 1416 bp, synthetic construct
  misc_feature 1..1416: note = Synthetic
  source 1..1416: mol_type = other DNA
atggacatgagggtgcccgctcagctcctggggctcctgctgctgtggctgagaggtgcgcgctgtgaggtgcagctgttggagtctgggggaggcatggtacagccgggggggtccctgagactctcctgtgcagtctctggattcacctttagtcgctatgccatgagctgggtccgccaggctccagggaaggggctggagtgggtgtcagaaatgaggggtagtagtggtagcacatactacgcagactccgtgaagggccggttcaccatctccagagacaattccaagaacacgctgtatctgcaaatgaacagcctgagagtcgaggacacggccatctattactgtgcgaaagaatttagcagcaactccctctttgactactggggccagggaaccctggtcaccgtgtcctcagcctccaccaagggcccatcggtcttccccctggcaccctcctccaagagcacctctgggggcacagcggccctgggctgcctggtcaaggactacttccccgaaccggtgacggtgtcgtggaactcaggcgccctgaccagcggcgtgcacaccttcccggctgtcctacagtcctcaggactctactccctcagcagcgtggtgaccgtgccctccagcagcttgggcacccagacctacatctgcaacgtgaatcacaagcccagcaacaccaaggtggacaagaaagttgagcccaaatcttgtgacaaaactcacacatgcccaccgtgcccagcacctgaactcctggggggaccgtcagtcttcctcttccccccaaaacccaaggacaccctcatgatctcccggacccctgaggtcacatgcgtggtggtggacgtgagccacgaagaccctgaggtcaagttcaactggtacgtggacggcgtggaggtgcataatgccaagacaaagccgtgcgaggagcagtacggcagcacgtaccgttgcgtcagcgtcctcaccgtcctgcaccaggactggctgaatggcaaggagtacaagtgcaaggtgtccaacaaagccctcccagcccccatcgagaaaaccatctccaaagccaaagggcagccccgagaaccacaggtgtacaccctgcccccatcccgggaggagatgaccaagaaccaggtcagcctgacctgcctggtcaaaggcttctatcccagcgacatcgccgtggagtgggagagcaatgggcagccggagaacaactacaagaccacgcctcccgtgctggactccgacggctccttcttcctctatagcaagctcaccgtggacaagagcaggtggcagcaggggaacgtcttctcatgctccgtgatgcatgaggctctgcacaaccactacacgcagaagagcctctccctgtctccgggcaaatag

SEQ ID NO: 1893 - protein, 446 aa, synthetic construct
  REGION 1..446: note = Synthetic
EVQLVESGGGLVQPGGSLRLSCAASGFTFSSNWMSWVRQAPGKGLDWMASMKQDGSEIYYVDSVKGRFTISRDNAKNSLHLQMNSLRAEDTAVYYCVRGGWRFESWGQGALVTVSSASTKGPSVFPLAPSSKSTSGGTAALGCLVKDYFPEPVTVSWNSGALTSGVHTFPAVLQSSGLYSLSSVVTVPSSSLGTQTYICNVNHKPSNTKVDKKVEPKSCDKTHTCPPCPAPELLGGPSVFLFPPKPKDTLMISRTPEVTCVVVDVSHEDPEVKFNWYVDGVEVHNAKTKPCEEQYGSTYRCVSVLTVLHQDWLNGKEYKCKVSNKALPAPIEKTISKAKGQPREPQVYTLPPSREEMTKNQVSLTCLVKGFYPSDIAVEWESNGQPENNYKTTPPVLDSDGSFFLYSKLTVDKSRWQQGNVFSCSVMHEALHNHYTQKSLSLSPGK

SEQ ID NO: 1894 - DNA, 1407 bp, synthetic construct
  misc_feature 1..1407: note = Synthetic
  source 1..1407: mol_type = other DNA
atggacatgagggtgcccgctcagctcctggggctcctgctgctgtggctgagaggtgcgcgctgtgaggtgcagctggtggagtctgggggaggcttggtccagcctggggggtccctgagactctcctgtgcagcctctggattcacctttagcagcaattggatgagctgggtccgccaggctccagggaaggggctggactggatggccagcatgaagcaagatggaagtgagatctactatgtggactctgtgaagggccgattcaccatctccagagacaacgccaagaactcactgcatctgcaaatgaacagcctgagagccgaggacacggctgtgtattactgtgtgagaggagggtggagatttgagtcctggggccagggagccctggtcaccgtgtcctcagcctccaccaagggcccatcggtcttccccctggcaccctcctccaagagcacctctgggggcacagcggccctgggctgcctggtcaaggactacttccccgaaccggtgacggtgtcgtggaactcaggcgccctgaccagcggcgtgcacaccttcccggctgtcctacagtcctcaggactctactccctcagcagcgtggtgaccgtgccctccagcagcttgggcacccagacctacatctgcaacgtgaatcacaagcccagcaacaccaaggtggacaagaaagttgagcccaaatcttgtgacaaaactcacacatgcccaccgtgcccagcacctgaactcctggggggaccgtcagtcttcctcttccccccaaaacccaaggacaccctcatgatctcccggacccctgaggtcacatgcgtggtggtggacgtgagccacgaagaccctgaggtcaagttcaactggtacgtggacggcgtggaggtgcataatgccaagacaaagccgtgcgaggagcagtacggcagcacgtaccgttgcgtcagcgtcctcaccgtcctgcaccaggactggctgaatggcaaggagtacaagtgcaaggtgtccaacaaagccctcccagcccccatcgagaaaaccatctccaaagccaaagggcagccccgagaaccacaggtgtacaccctgcccccatcccgggaggagatgaccaagaaccaggtcagcctgacctgcctggtcaaaggcttctatcccagcgacatcgccgtggagtgggagagcaatgggcagccggagaacaactacaagaccacgcctcccgtgctggactccgacggctccttcttcctctatagcaagctcaccgtggacaagagcaggtggcagcaggggaacgtcttctcatgctccgtgatgcatgaggctctgcacaaccactacacgcagaagagcctctccctgtctccgggcaaatag

SEQ ID NO: 1895 - protein, 447 aa, synthetic construct
  REGION 1..447: note = Synthetic
EVQLVESGGGLVQPGGSLRLSCAASGFTFSSYWMSWVRQAPGKGLEWVANIKQDGSEEYYVDSVKGRFTISRDNAKNSLFLQMNSLRAEDTAVYYCARDYGDSFDYWGQGTLVTVSSASTKGPSVFPLAPSSKSTSGGTAALGCLVKDYFPEPVTVSWNSGALTSGVHTFPAVLQSSGLYSLSSVVTVPSSSLGTQTYICNVNHKPSNTKVDKKVEPKSCDKTHTCPPCPAPELLGGPSVFLFPPKPKDTLMISRTPEVTCVVVDVSHEDPEVKFNWYVDGVEVHNAKTKPCEEQYGSTYRCVSVLTVLHQDWLNGKEYKCKVSNKALPAPIEKTISKAKGQPREPQVYTLPPSREEMTKNQVSLTCLVKGFYPSDIAVEWESNGQPENNYKTTPPVLDSDGSFFLYSKLTVDKSRWQQGNVFSCSVMHEALHNHYTQKSLSLSPGK

SEQ ID NO: 1896 - DNA, 1410 bp, synthetic construct
  misc_feature 1..1410: note = Synthetic
  source 1..1410: mol_type = other DNA
atggacatgagggtgcccgctcagctcctggggctcctgctgctgtggctgagaggtgcgcgctgtgaggtgcagctggtggagtctgggggaggcttggtccagccgggggggtccctgagactctcctgtgcagcctctggattcacctttagtagctattggatgagctgggtccgccaggctccagggaaggggctggagtgggtggccaacatcaagcaagatggaagtgaggaatattatgtggactctgtgaagggccgattcaccatctccagagacaacgccaagaactcactgtttctgcaaatgaacagcctgagagccgaggacacggctgtgtattactgtgcgagagactacggtgactcctttgactactggggccagggaaccctggtcaccgtgtcctcagcctccaccaagggcccatcggtcttccccctggcaccctcctccaagagcacctctgggggcacagcggccctgggctgcctggtcaaggactacttccccgaaccggtgacggtgtcgtggaactcaggcgccctgaccagcggcgtgcacaccttcccggctgtcctacagtcctcaggactctactccctcagcagcgtggtgaccgtgccctccagcagcttgggcacccagacctacatctgcaacgtgaatcacaagcccagcaacaccaaggtggacaagaaagttgagcccaaatcttgtgacaaaactcacacatgcccaccgtgcccagcacctgaactcctggggggaccgtcagtcttcctcttccccccaaaacccaaggacaccctcatgatctcccggacccctgaggtcacatgcgtggtggtggacgtgagccacgaagaccctgaggtcaagttcaactggtacgtggacggcgtggaggtgcataatgccaagacaaagccgtgcgaggagcagtacggcagcacgtaccgttgcgtcagcgtcctcaccgtcctgcaccaggactggctgaatggcaaggagtacaagtgcaaggtgtccaacaaagccctcccagcccccatcgagaaaaccatctccaaagccaaagggcagccccgagaaccacaggtgtacaccctgcccccatcccgggaggagatgaccaagaaccaggtcagcctgacctgcctggtcaaaggcttctatcccagcgacatcgccgtggagtgggagagcaatgggcagccggagaacaactacaagaccacgcctcccgtgctggactccgacggctccttcttcctctatagcaagctcaccgtggacaagagcaggtggcagcaggggaacgtcttctcatgctccgtgatgcatgaggctctgcacaaccactacacgcagaagagcctctccctgtctccgggcaaatag

SEQ ID NO: 1897 - protein, 452 aa, synthetic construct
  REGION 1..452: note = Synthetic
QVQLVQSGAEVKKPGASVKVSCKASGYTFTRYDINWVRQATGQGLEWMGWLNPNSGNTGQTQKFRGRVTMTRDTSINTAYMELSSLRSEDTAVYYCARGGYTSAWRWYFDLWGRGTLVTVSSASTKGPSVFPLAPSSKSTSGGTAALGCLVKDYFPEPVTVSWNSGALTSGVHTFPAVLQSSGLYSLSSVVTVPSSSLGTQTYICNVNHKPSNTKVDKKVEPKSCDKTHTCPPCPAPELLGGPSVFLFPPKPKDTLMISRTPEVTCVVVDVSHEDPEVKFNWYVDGVEVHNAKTKPCEEQYGSTYRCVSVLTVLHQDWLNGKEYKCKVSNKALPAPIEKTISKAKGQPREPQVYTLPPSREEMTKNQVSLTCLVKGFYPSDIAVEWESNGQPENNYKTTPPVLDSDGSFFLYSKLTVDKSRWQQGNVFSCSVMHEALHNHYTQKSLSLSPGK

SEQ ID NO: 1898 - DNA, 1425 bp, synthetic construct
  misc_feature 1..1425: note = Synthetic
  source 1..1425: mol_type = other DNA
atggacatgagggtgcccgctcagctcctggggctcctgctgctgtggctgagaggtgcgcgctgtcaggtgcagctggtgcagtctggggctgaggtgaagaagcctggggcctcagtgaaggtgtcctgcaaggcttctggatacaccttcacccgttatgatatcaactgggtgcgacaggccactggacaagggcttgagtggatgggatggctgaaccctaatagtggtaacacaggccagacacagaagttccggggcagagtcaccatgaccagggacacctccatcaatacagcctacatggagctgagcagcctgagatctgaggacacggccgtgtattactgtgcgagaggggggtataccagtgcctggagatggtacttcgatctctggggccgtggcaccctggtcactgtctcctcagcctccaccaagggcccatcggtcttccccctggcaccctcctccaagagcacctctgggggcacagcggccctgggctgcctggtcaaggactacttccccgaaccggtgacggtgtcgtggaactcaggcgccctgaccagcggcgtgcacaccttcccggctgtcctacagtcctcaggactctactccctcagcagcgtggtgaccgtgccctccagcagcttgggcacccagacctacatctgcaacgtgaatcacaagcccagcaacaccaaggtggacaagaaagttgagcccaaatcttgtgacaaaactcacacatgcccaccgtgcccagcacctgaactcctggggggaccgtcagtcttcctcttccccccaaaacccaaggacaccctcatgatctcccggacccctgaggtcacatgcgtggtggtggacgtgagccacgaagaccctgaggtcaagttcaactggtacgtggacggcgtggaggtgcataatgccaagacaaagccgtgcgaggagcagtacggcagcacgtaccgttgcgtcagcgtcctcaccgtcctgcaccaggactggctgaatggcaaggagtacaagtgcaaggtgtccaacaaagccctcccagcccccatcgagaaaaccatctccaaagccaaagggcagccccgagaaccacaggtgtacaccctgcccccatcccgggaggagatgaccaagaaccaggtcagcctgacctgcctggtcaaaggcttctatcccagcgacatcgccgtggagtgggagagcaatgggcagccggagaacaactacaagaccacgcctcccgtgctggactccgacggctccttcttcctctatagcaagctcaccgtggacaagagcaggtggcagcaggggaacgtcttctcatgctccgtgatgcatgaggctctgcacaaccactacacgcagaagagcctctccctgtctccgggcaaatag

SEQ ID NO: 1899 - protein, 449 aa, synthetic construct
  REGION 1..449: note = Synthetic
EVQLLESGGGLVQPGGSLRLSCAASGFTFSSYAMTWVRQAPGRGLQWVSTISGSGSNTYYADSVKGRFTISRDNSKNTLYLQMSSLRAEDTAVYYCAKEGGSNRYFHHWGQGTLVTISSASTKGPSVFPLAPSSKSTSGGTAALGCLVKDYFPEPVTVSWNSGALTSGVHTFPAVLQSSGLYSLSSVVTVPSSSLGTQTYICNVNHKPSNTKVDKKVEPKSCDKTHTCPPCPAPELLGGPSVFLFPPKPKDTLMISRTPEVTCVVVDVSHEDPEVKFNWYVDGVEVHNAKTKPCEEQYGSTYRCVSVLTVLHQDWLNGKEYKCKVSNKALPAPIEKTISKAKGQPREPQVYTLPPSREEMTKNQVSLTCLVKGFYPSDIAVEWESNGQPENNYKTTPPVLDSDGSFFLYSKLTVDKSRWQQGNVFSCSVMHEALHNHYTQKSLSLSPGK

SEQ ID NO: 1900 - DNA, 1416 bp, synthetic construct
  misc_feature 1..1416: note = Synthetic
  source 1..1416: mol_type = other DNA
atggacatgagggtgcccgctcagctcctggggctcctgctgctgtggctgagaggtgcgcgctgtgaggtgcagctgttggagtctgggggaggcttggtacagcctggggggtccctgagactctcctgtgcagcctctggattcacctttagcagctatgccatgacctgggtccgccaggctccagggagggggctgcagtgggtgtcaactattagtggtagtggtagtaacacatactacgcagactccgtgaagggccggttcaccatctccagagacaattccaagaacacgctgtatctgcaaatgagcagcctgagagccgaggacacggccgtatattactgtgcgaaagaggggggcagtaaccgatacttccaccactggggccagggcaccctggtcaccatctcctcagcctccaccaagggcccatcggtcttccccctggcaccctcctccaagagcacctctgggggcacagcggccctgggctgcctggtcaaggactacttccccgaaccggtgacggtgtcgtggaactcaggcgccctgaccagcggcgtgcacaccttcccggctgtcctacagtcctcaggactctactccctcagcagcgtggtgaccgtgccctccagcagcttgggcacccagacctacatctgcaacgtgaatcacaagcccagcaacaccaaggtggacaagaaagttgagcccaaatcttgtgacaaaactcacacatgcccaccgtgcccagcacctgaactcctggggggaccgtcagtcttcctcttccccccaaaacccaaggacaccctcatgatctcccggacccctgaggtcacatgcgtggtggtggacgtgagccacgaagaccctgaggtcaagttcaactggtacgtggacggcgtggaggtgcataatgccaagacaaagccgtgcgaggagcagtacggcagcacgtaccgttgcgtcagcgtcctcaccgtcctgcaccaggactggctgaatggcaaggagtacaagtgcaaggtgtccaacaaagccctcccagcccccatcgagaaaaccatctccaaagccaaagggcagccccgagaaccacaggtgtacaccctgcccccatcccgggaggagatgaccaagaaccaggtcagcctgacctgcctggtcaaaggcttctatcccagcgacatcgccgtggagtgggagagcaatgggcagccggagaacaactacaagaccacgcctcccgtgctggactccgacggctccttcttcctctatagcaagctcaccgtggacaagagcaggtggcagcaggggaacgtcttctcatgctccgtgatgcatgaggctctgcacaaccactacacgcagaagagcctctccctgtctccgggcaaatag

SEQ ID NO: 1901 - protein, 452 aa, synthetic construct
  REGION 1..452: note = Synthetic
QVQLVQSGAEVTKPGASVKVSCKASGYTFTRYDINWVRQATGQGLEWMGWMNPNSGNSGSVQKFRGRVTMTRDTSITTVYMELSSLRSDDTAVYYCARGGISSSWHWAFDIWGQGTMVTVSSASTKGPSVFPLAPSSKSTSGGTAALGCLVKDYFPEPVTVSWNSGALTSGVHTFPAVLQSSGLYSLSSVVTVPSSSLGTQTYICNVNHKPSNTKVDKKVEPKSCDKTHTCPPCPAPELLGGPSVFLFPPKPKDTLMISRTPEVTCVVVDVSHEDPEVKFNWYVDGVEVHNAKTKPCEEQYGSTYRCVSVLTVLHQDWLNGKEYKCKVSNKALPAPIEKTISKAKGQPREPQVYTLPPSREEMTKNQVSLTCLVKGFYPSDIAVEWESNGQPENNYKTTPPVLDSDGSFFLYSKLTVDKSRWQQGNVFSCSVMHEALHNHYTQKSLSLSPGK

SEQ ID NO: 1902 - DNA, 1425 bp, synthetic construct
  misc_feature 1..1425: note = Synthetic
  source 1..1425: mol_type = other DNA
atggacatgagggtgcccgctcagctcctggggctcctgctgctgtggctgagaggtgcgcgctgtcaggtgcaactggtgcagtctggggctgaggtgacgaagcctggggcctcagtgaaggtgtcctgcaaggcttctggatacaccttcaccagatatgatatcaactgggtgcgacaggccactggacaagggcttgagtggatgggatggatgaaccctaacagtggtaattcaggctctgtacagaaattccggggcagagtcaccatgaccagggacacctccatcaccacagtctatatggaactgagcagcctgagatctgatgacacggccgtgtattactgtgcgagaggaggaattagcagcagctggcactgggcttttgatatctggggccaagggacaatggtcaccgtgtcttcagcctccaccaagggcccatcggtcttccccctggcaccctcctccaagagcacctctgggggcacagcggccctgggctgcctggtcaaggactacttccccgaaccggtgacggtgtcgtggaactcaggcgccctgaccagcggcgtgcacaccttcccggctgtcctacagtcctcaggactctactccctcagcagcgtggtgaccgtgccctccagcagcttgggcacccagacctacatctgcaacgtgaatcacaagcccagcaacaccaaggtggacaagaaagttgagcccaaatcttgtgacaaaactcacacatgcccaccgtgcccagcacctgaactcctggggggaccgtcagtcttcctcttccccccaaaacccaaggacaccctcatgatctcccggacccctgaggtcacatgcgtggtggtggacgtgagccacgaagaccctgaggtcaagttcaactggtacgtggacggcgtggaggtgcataatgccaagacaaagccgtgcgaggagcagtacggcagcacgtaccgttgcgtcagcgtcctcaccgtcctgcaccaggactggctgaatggcaaggagtacaagtgcaaggtgtccaacaaagccctcccagcccccatcgagaaaaccatctccaaagccaaagggcagccccgagaaccacaggtgtacaccctgcccccatcccgggaggagatgaccaagaaccaggtcagcctgacctgcctggtcaaaggcttctatcccagcgacatcgccgtggagtgggagagcaatgggcagccggagaacaactacaagaccacgcctcccgtgctggactccgacggctccttcttcctctatagcaagctcaccgtggacaagagcaggtggcagcaggggaacgtcttctcatgctccgtgatgcatgaggctctgcacaaccactacacgcagaagagcctctccctgtctccgggcaaatag

SEQ ID NO: 1903 - protein, 453 aa, synthetic construct
  REGION 1..453: note = Synthetic
QVQLVQSGAEVKKPGASVKVSCKASGYTFTSYDINWVRQATGQGLEWMGWMNPNSGNSGSVKKFRDRVTMTRDTSISTAYMELSSLRSEDTAVYYCVRLIGYSSAWKWSFQHWGQGTLVTVSSASTKGPSVFPLAPSSKSTSGGTAALGCLVKDYFPEPVTVSWNSGALTSGVHTFPAVLQSSGLYSLSSVVTVPSSSLGTQTYICNVNHKPSNTKVDKKVEPKSCDKTHTCPPCPAPELLGGPSVFLFPPKPKDTLMISRTPEVTCVVVDVSHEDPEVKFNWYVDGVEVHNAKTKPCEEQYGSTYRCVSVLTVLHQDWLNGKEYKCKVSNKALPAPIEKTISKAKGQPREPQVYTLPPSREEMTKNQVSLTCLVKGFYPSDIAVEWESNGQPENNYKTTPPVLDSDGSFFLYSKLTVDKSRWQQGNVFSCSVMHEALHNHYTQKSLSLSPGK

SEQ ID NO: 1904 - DNA, 1428 bp, synthetic construct
  misc_feature 1..1428: note = Synthetic
  source 1..1428: mol_type = other DNA
atggacatgagggtgcccgctcagctcctggggctcctgctgctgtggctgagaggtgcgcgctgtcaggtgcagctggtgcagtctggggctgaggtgaagaagcctggggcctcagtgaaggtgtcctgcaaggcttctggatacaccttcaccagttatgatatcaattgggtgcgacaggccactggacaagggcttgagtggatgggatggatgaaccctaacagtggtaactcaggctctgtaaagaagttccgggacagagtcaccatgaccagggacacctccatcagcactgcctacatggaattgagcagcctgagatctgaggacacggccgtgtattactgtgtgagacttatcgggtatagcagtgcctggaagtggtccttccagcactggggccagggcaccctggtcaccgtgtcctcagcctccaccaagggcccatcggtcttccccctggcaccctcctccaagagcacctctgggggcacagcggccctgggctgcctggtcaaggactacttccccgaaccggtgacggtgtcgtggaactcaggcgccctgaccagcggcgtgcacaccttcccggctgtcctacagtcctcaggactctactccctcagcagcgtggtgaccgtgccctccagcagcttgggcacccagacctacatctgcaacgtgaatcacaagcccagcaacaccaaggtggacaagaaagttgagcccaaatcttgtgacaaaactcacacatgcccaccgtgcccagcacctgaactcctggggggaccgtcagtcttcctcttccccccaaaacccaaggacaccctcatgatctcccggacccctgaggtcacatgcgtggtggtggacgtgagccacgaagaccctgaggtcaagttcaactggtacgtggacggcgtggaggtgcataatgccaagacaaagccgtgcgaggagcagtacggcagcacgtaccgttgcgtcagcgtcctcaccgtcctgcaccaggactggctgaatggcaaggagtacaagtgcaaggtgtccaacaaagccctcccagcccccatcgagaaaaccatctccaaagccaaagggcagccccgagaaccacaggtgtacaccctgcccccatcccgggaggagatgaccaagaaccaggtcagcctgacctgcctggtcaaaggcttctatcccagcgacatcgccgtggagtgggagagcaatgggcagccggagaacaactacaagaccacgcctcccgtgctggactccgacggctccttcttcctctatagcaagctcaccgtggacaagagcaggtggcagcaggggaacgtcttctcatgctccgtgatgcatgaggctctgcacaaccactacacgcagaagagcctctccctgtctccgggcaaatag

SEQ ID NO: 1905 - protein, 452 aa, synthetic construct
  REGION 1..452: note = Synthetic
QVQLVQSGAEVKKPGASVKVSCKASGYTFTSYDINWVRQATGQGLEWMGRMNPKSGNAGYVQNFRGRVTMTRDTSISTAYMELSSLRSEDTAVYYCARGGRTSIWSFVFDYWGQGTLVTVSSASTKGPSVFPLAPSSKSTSGGTAALGCLVKDYFPEPVTVSWNSGALTSGVHTFPAVLQSSGLYSLSSVVTVPSSSLGTQTYICNVNHKPSNTKVDKKVEPKSCDKTHTCPPCPAPELLGGPSVFLFPPKPKDTLMISRTPEVTCVVVDVSHEDPEVKFNWYVDGVEVHNAKTKPCEEQYGSTYRCVSVLTVLHQDWLNGKEYKCKVSNKALPAPIEKTISKAKGQPREPQVYTLPPSREEMTKNQVSLTCLVKGFYPSDIAVEWESNGQPENNYKTTPPVLDSDGSFFLYSKLTVDKSRWQQGNVFSCSVMHEALHNHYTQKSLSLSPGK

SEQ ID NO: 1906 - DNA, 1425 bp, synthetic construct
  misc_feature 1..1425: note = Synthetic
  source 1..1425: mol_type = other DNA
atggacatgagggtgcccgctcagctcctggggctcctgctgctgtggctgagaggtgcgcgctgtcaggtgcagctggtgcagtctggggctgaggtgaagaagcctggggcctcagtgaaggtgtcctgcaaggcttctggatacaccttcaccagttatgatatcaactgggtgcgacaggccactggacaagggcttgagtggatgggaaggatgaaccctaagagtggtaatgcaggctatgtacagaacttccggggcagagtcaccatgaccagggacacctccatcagcacagcctacatggagctgagcagcctgagatctgaggacacggccgtgtattactgtgcgagaggcgggcgtaccagcatctggtccttcgtctttgattactggggccagggcaccctggtcaccgtgtcctcagcctccaccaagggcccatcggtcttccccctggcaccctcctccaagagcacctctgggggcacagcggccctgggctgcctggtcaaggactacttccccgaaccggtgacggtgtcgtggaactcaggcgccctgaccagcggcgtgcacaccttcccggctgtcctacagtcctcaggactctactccctcagcagcgtggtgaccgtgccctccagcagcttgggcacccagacctacatctgcaacgtgaatcacaagcccagcaacaccaaggtggacaagaaagttgagcccaaatcttgtgacaaaactcacacatgcccaccgtgcccagcacctgaactcctggggggaccgtcagtcttcctcttccccccaaaacccaaggacaccctcatgatctcccggacccctgaggtcacatgcgtggtggtggacgtgagccacgaagaccctgaggtcaagttcaactggtacgtggacggcgtggaggtgcataatgccaagacaaagccgtgcgaggagcagtacggcagcacgtaccgttgcgtcagcgtcctcaccgtcctgcaccaggactggctgaatggcaaggagtacaagtgcaaggtgtccaacaaagccctcccagcccccatcgagaaaaccatctccaaagccaaagggcagccccgagaaccacaggtgtacaccctgcccccatcccgggaggagatgaccaagaaccaggtcagcctgacctgcctggtcaaaggcttctatcccagcgacatcgccgtggagtgggagagcaatgggcagccggagaacaactacaagaccacgcctcccgtgctggactccgacggctccttcttcctctatagcaagctcaccgtggacaagagcaggtggcagcaggggaacgtcttctcatgctccgtgatgcatgaggctctgcacaaccactacacgcagaagagcctctccctgtctccgggcaaatag

SEQ ID NO: 1907 - protein, 454 aa, synthetic construct
  REGION 1..454: note = Synthetic
QVQLVQSGAEVKKPGASVKVSCKASGYTFTSYDINWVRQATGQGLEWMGWMNPNRGNTGYVKKFQGRVTMTRDTSISTAYMELSSLRSEDTAVYYCARRRAVYRSSWEWYFDLWGRGTLVTVSSASTKGPSVFPLAPSSKSTSGGTAALGCLVKDYFPEPVTVSWNSGALTSGVHTFPAVLQSSGLYSLSSVVTVPSSSLGTQTYICNVNHKPSNTKVDKKVEPKSCDKTHTCPPCPAPELLGGPSVFLFPPKPKDTLMISRTPEVTCVVVDVSHEDPEVKFNWYVDGVEVHNAKTKPCEEQYGSTYRCVSVLTVLHQDWLNGKEYKCKVSNKALPAPIEKTISKAKGQPREPQVYTLPPSREEMTKNQVSLTCLVKGFYPSDIAVEWESNGQPENNYKTTPPVLDSDGSFFLYSKLTVDKSRWQQGNVFSCSVMHEALHNHYTQKSLSLSPGK

SEQ ID NO: 1908 - DNA, 1431 bp, synthetic construct
  misc_feature 1..1431: note = Synthetic
  source 1..1431: mol_type = other DNA
atggacatgagggtgcccgctcagctcctggggctcctgctgctgtggctgagaggtgcgcgctgtcaggtgcagctggtgcagtctggggctgaggtgaagaagcctggggcctcagtgaaggtgtcctgcaaggcttctggatacaccttcaccagttatgatatcaactgggtgcgacaggccactggacaagggcttgagtggatgggatggatgaaccctaacaggggtaacacaggctatgtaaagaagttccagggcagagtcaccatgaccagggacacctccatcagcacagcctacatggagctgagtagtctgagatctgaggacacggccgtgtattactgtgcgagaaggagggccgtgtatcgcagcagctgggagtggtacttcgatctctggggccgtggcaccctggtcactgtctcctcagcctccaccaagggcccatcggtcttccccctggcaccctcctccaagagcacctctgggggcacagcggccctgggctgcctggtcaaggactacttccccgaaccggtgacggtgtcgtggaactcaggcgccctgaccagcggcgtgcacaccttcccggctgtcctacagtcctcaggactctactccctcagcagcgtggtgaccgtgccctccagcagcttgggcacccagacctacatctgcaacgtgaatcacaagcccagcaacaccaaggtggacaagaaagttgagcccaaatcttgtgacaaaactcacacatgcccaccgtgcccagcacctgaactcctggggggaccgtcagtcttcctcttccccccaaaacccaaggacaccctcatgatctcccggacccctgaggtcacatgcgtggtggtggacgtgagccacgaagaccctgaggtcaagttcaactggtacgtggacggcgtggaggtgcataatgccaagacaaagccgtgcgaggagcagtacggcagcacgtaccgttgcgtcagcgtcctcaccgtcctgcaccaggactggctgaatggcaaggagtacaagtgcaaggtgtccaacaaagccctcccagcccccatcgagaaaaccatctccaaagccaaagggcagccccgagaaccacaggtgtacaccctgcccccatcccgggaggagatgaccaagaaccaggtcagcctgacctgcctggtcaaaggcttctatcccagcgacatcgccgtggagtgggagagcaatgggcagccggagaacaactacaagaccacgcctcccgtgctggactccgacggctccttcttcctctatagcaagctcaccgtggacaagagcaggtggcagcaggggaacgtcttctcatgctccgtgatgcatgaggctctgcacaaccactacacgcagaagagcctctccctgtctccgggcaaatag

SEQ ID NO: 1909 - protein, 452 aa, synthetic construct
  REGION 1..452: note = Synthetic
QVQLVQSGAEVKKPGASVKVSCKASGYTFTGYYMHWVRQAPGQGLEWMGWFKPNSGVTNYAQKFQGRVTMSRDTSISTAYMELSSLRSDDTAVYYCARAGYSTSWKDWFDPWGQGTLVTVSSASTKGPSVFPLAPSSKSTSGGTAALGCLVKDYFPEPVTVSWNSGALTSGVHTFPAVLQSSGLYSLSSVVTVPSSSLGTQTYICNVNHKPSNTKVDKKVEPKSCDKTHTCPPCPAPELLGGPSVFLFPPKPKDTLMISRTPEVTCVVVDVSHEDPEVKFNWYVDGVEVHNAKTKPCEEQYGSTYRCVSVLTVLHQDWLNGKEYKCKVSNKALPAPIEKTISKAKGQPREPQVYTLPPSREEMTKNQVSLTCLVKGFYPSDIAVEWESNGQPENNYKTTPPVLDSDGSFFLYSKLTVDKSRWQQGNVFSCSVMHEALHNHYTQKSLSLSPGK

SEQ ID NO: 1910 - DNA, 1425 bp, synthetic construct
  misc_feature 1..1425: note = Synthetic
  source 1..1425: mol_type = other DNA
atggacatgagggtgcccgctcagctcctggggctcctgctgctgtggctgagaggtgcgcgctgtcaggtgcagctggtgcagtctggggctgaggtgaagaagcctggggcctcagtgaaggtgtcctgcaaggcttctggatacaccttcaccggctactatatgcactgggtgcgacaggcccctggacaagggcttgagtggatgggatggttcaaacctaatagtggtgtcacaaactatgcacagaagtttcagggcagggtcaccatgagcagggacacgtccatcagcacagcctacatggagctgagcagcctgagatctgacgacacggccgtgtattactgtgcgagagccggatacagcaccagttggaaagactggttcgacccctggggccagggaaccctggtcaccgtgtcttcagcctccaccaagggcccatcggtcttccccctggcaccctcctccaagagcacctctgggggcacagcggccctgggctgcctggtcaaggactacttccccgaaccggtgacggtgtcgtggaactcaggcgccctgaccagcggcgtgcacaccttcccggctgtcctacagtcctcaggactctactccctcagcagcgtggtgaccgtgccctccagcagcttgggcacccagacctacatctgcaacgtgaatcacaagcccagcaacaccaaggtggacaagaaagttgagcccaaatcttgtgacaaaactcacacatgcccaccgtgcccagcacctgaactcctggggggaccgtcagtcttcctcttccccccaaaacccaaggacaccctcatgatctcccggacccctgaggtcacatgcgtggtggtggacgtgagccacgaagaccctgaggtcaagttcaactggtacgtggacggcgtggaggtgcataatgccaagacaaagccgtgcgaggagcagtacggcagcacgtaccgttgcgtcagcgtcctcaccgtcctgcaccaggactggctgaatggcaaggagtacaagtgcaaggtgtccaacaaagccctcccagcccccatcgagaaaaccatctccaaagccaaagggcagccccgagaaccacaggtgtacaccctgcccccatcccgggaggagatgaccaagaaccaggtcagcctgacctgcctggtcaaaggcttctatcccagcgacatcgccgtggagtgggagagcaatgggcagccggagaacaactacaagaccacgcctcccgtgctggactccgacggctccttcttcctctatagcaagctcaccgtggacaagagcaggtggcagcaggggaacgtcttctcatgctccgtgatgcatgaggctctgcacaaccactacacgcagaagagcctctccctgtctccgggcaaatag

SEQ ID NO: 1911 - protein, 452 aa, synthetic construct; identical to SEQ ID NO: 1885
  REGION 1..452: note = Synthetic

SEQ ID NO: 1912 - DNA, 1425 bp, synthetic construct; identical to SEQ ID NO: 1886
  misc_feature 1..1425: note = Synthetic
  source 1..1425: mol_type = other DNA

SEQ ID NO: 1913 - protein, 449 aa, synthetic construct; identical to SEQ ID NO: 1889
  REGION 1..449: note = Synthetic

SEQ ID NO: 1914 - DNA, 1416 bp, synthetic construct; identical to SEQ ID NO: 1890
  misc_feature 1..1416: note = Synthetic
  source 1..1416: mol_type = other DNA

SEQ ID NO: 1915 - protein, 447 aa, synthetic construct; identical to SEQ ID NO: 1895
  REGION 1..447: note = Synthetic

SEQ ID NO: 1916 - DNA, 1410 bp, synthetic construct; identical to SEQ ID NO: 1896
  misc_feature 1..1410: note = Synthetic
  source 1..1410: mol_type = other DNA

SEQ ID NO: 1917 - protein, 452 aa, synthetic construct; identical to SEQ ID NO: 1897
  REGION 1..452: note = Synthetic

SEQ ID NO: 1918 - DNA, 1425 bp, synthetic construct; identical to SEQ ID NO: 1898
  misc_feature 1..1425: note = Synthetic
  source 1..1425: mol_type = other DNA

SEQ ID NO: 1919 - protein, 453 aa, synthetic construct; identical to SEQ ID NO: 1903
  REGION 1..453: note = Synthetic

SEQ ID NO: 1920 - DNA, 1428 bp, synthetic construct; identical to SEQ ID NO: 1904
  misc_feature 1..1428: note = Synthetic
  source 1..1428: mol_type = other DNA

SEQ ID NO: 1921 - protein, 454 aa, synthetic construct; identical to SEQ ID NO: 1907
  REGION 1..454: note = Synthetic

SEQ ID NO: 1922 - DNA, 1431 bp, synthetic construct; identical to SEQ ID NO: 1908
  misc_feature 1..1431: note = Synthetic
  source 1..1431: mol_type = other DNA

SEQ ID NO: 1923 - protein, 452 aa, synthetic construct; identical to SEQ ID NO: 1909
  REGION 1..452: note = Synthetic

SEQ ID NO: 1924 - DNA, 1425 bp, synthetic construct; identical to SEQ ID NO: 1910
  misc_feature 1..1425: note = Synthetic
  source 1..1425: mol_type = other DNA

SEQ ID NO: 1925 - protein, 452 aa, synthetic construct
  REGION 1..452: note = Synthetic
QVQLVQSGAEVKKPGASVKVSCKASGYTFTRYDINWVRQATGQGLEWMGWLNPNSGNTGQTQKFRGRVTMTRDTSISTAYMELSSLRSEDTAVYYCARGGYTSAWRWYFDLWGRGTLVTVSSASTKGPSVFPLAPSSKSTSGGTAALGCLVKDYFPEPVTVSWNSGALTSGVHTFPAVLQSSGLYSLSSVVTVPSSSLGTQTYICNVNHKPSNTKVDKKVEPKSCDKTHTCPPCPAPELLGGPSVFLFPPKPKDTLMISRTPEVTCVVVDVSHEDPEVKFNWYVDGVEVHNAKTKPCEEQYGSTYRCVSVLTVLHQDWLNGKEYKCKVSNKALPAPIEKTISKAKGQPREPQVYTLPPSREEMTKNQVSLTCLVKGFYPSDIAVEWESNGQPENNYKTTPPVLDSDGSFFLYSKLTVDKSRWQQGNVFSCSVMHEALHNHYTQKSLSLSPGK

SEQ ID NO: 1926 - DNA, 1425 bp, synthetic construct
  misc_feature 1..1425: note = Synthetic
  source 1..1425: mol_type = other DNA
atggacatgagggtgcccgctcagctcctggggctcctgctgctgtggctgagaggtgcgcgctgtcaggtgcagctggtgcagtctggggctgaggtgaagaagcctggggcctcagtgaaggtgtcctgcaaggcttctggatacaccttcacccgttatgatatcaactgggtgcgacaggccactggacaagggcttgagtggatgggatggctgaaccctaatagtggtaacacaggccagacacagaagttccggggcagagtcaccatgaccagggacacctccatctctacagcctacatggagctgagcagcctgagatctgaggacacggccgtgtattactgtgcgagaggggggtataccagtgcctggagatggtacttcgatctctggggccgtggcaccctggtcactgtctcctcagcctccaccaagggcccatcggtcttccccctggcaccctcctccaagagcacctctgggggcacagcggccctgggctgcctggtcaaggactacttccccgaaccggtgacggtgtcgtggaactcaggcgccctgaccagcggcgtgcacaccttcccggctgtcctacagtcctcaggactctactccctcagcagcgtggtgaccgtgccctccagcagcttgggcacccagacctacatctgcaacgtgaatcacaagcccagcaacaccaaggtggacaagaaagttgagcccaaatcttgtgacaaaactcacacatgcccaccgtgcccagcacctgaactcctggggggaccgtcagtcttcctcttccccccaaaacccaaggacaccctcatgatctcccggacccctgaggtcacatgcgtggtggtggacgtgagccacgaagaccctgaggtcaagttcaactggtacgtggacggcgtggaggtgcataatgccaagacaaagccgtgcgaggagcagtacggcagcacgtaccgttgcgtcagcgtcctcaccgtcctgcaccaggactggctgaatggcaaggagtacaagtgcaaggtgtccaacaaagccctcccagcccccatcgagaaaaccatctccaaagccaaagggcagccccgagaaccacaggtgtacaccctgcccccatcccgggaggagatgaccaagaaccaggtcagcctgacctgcctggtcaaaggcttctatcccagcgacatcgccgtggagtgggagagcaatgggcagccggagaacaactacaagaccacgcctcccgtgctggactccgacggctccttcttcctctatagcaagctcaccgtggacaagagcaggtggcagcaggggaacgtcttctcatgctccgtgatgcatgaggctctgcacaaccactacacgcagaagagcctctccctgtctccgggcaaatag

SEQ ID NO: 1927 - protein, 452 aa, synthetic construct; identical to SEQ ID NO: 1897
  REGION 1..452: note = Synthetic

SEQ ID NO: 1928 - DNA, 1425 bp, synthetic construct; identical to SEQ ID NO: 1898
  misc_feature 1..1425: note = Synthetic
  source 1..1425: mol_type = other DNA

SEQ ID NO: 1929 - protein, 452 aa, synthetic construct
  REGION 1..452: note = Synthetic
QVQLVQSGAEVKKPGASVKVSCKASGYTFTGYYMHWVRQAPGQGLEWMGWFKPNSGVTNYAQKFQGRVTMTRDTSISTAYMELSSLRSDDTAVYYCARAGYSTSYKDWFDPWGQGTLVTVSSASTKGPSVFPLAPSSKSTSGGTAALGCLVKDYFPEPVTVSWNSGALTSGVHTFPAVLQSSGLYSLSSVVTVPSSSLGTQTYICNVNHKPSNTKVDKKVEPKSCDKTHTCPPCPAPELLGGPSVFLFPPKPKDTLMISRTPEVTCVVVDVSHEDPEVKFNWYVDGVEVHNAKTKPCEEQYGSTYRCVSVLTVLHQDWLNGKEYKCKVSNKALPAPIEKTISKAKGQPREPQVYTLPPSREEMTKNQVSLTCLVKGFYPSDIAVEWESNGQPENNYKTTPPVLDSDGSFFLYSKLTVDKSRWQQGNVFSCSVMHEALHNHYTQKSLSLSPGK

SEQ ID NO: 1930 - DNA, 1425 bp, synthetic construct
  misc_feature 1..1425: note = Synthetic
  source 1..1425: mol_type = other DNA
atggacatgagggtgcccgctcagctcctggggctcctgctgctgtggctgagaggtgcgcgctgtcaggtgcagctggtgcagtctggggctgaggtgaagaagcctggggcctcagtgaaggtgtcctgcaaggcttctggatacaccttcaccggctactatatgcactgggtgcgacaggcccctggacaagggcttgagtggatgggatggttcaaacctaatagtggtgtcacaaactatgcacagaagtttcagggcagggtcaccatgactagggacacgtccatcagcacagcctacatggagctgagcagcctgagatctgacgacacggccgtgtattactgtgcgagagccggatacagcaccagttataaagactggttcgacccctggggccagggaaccctggtcaccgtgtcttcagcctccaccaagggcccatcggtcttccccctggcaccctcctccaagagcacctctgggggcacagcggccctgggctgcctggtcaaggactacttccccgaaccggtgacggtgtcgtggaactcaggcgccctgaccagcggcgtgcacaccttcccggctgtcctacagtcctcaggactctactccctcagcagcgtggtgaccgtgccctccagcagcttgggcacccagacctacatctgcaacgtgaatcacaagcccagcaacaccaaggtggacaagaaagttgagcccaaatcttgtgacaaaactcacacatgcccaccgtgcccagcacctgaactcctggggggaccgtcagtcttcctcttccccccaaaacccaaggacaccctcatgatctcccggacccctgaggtcacatgcgtggtggtggacgtgagccacgaagaccctgaggtcaagttcaactggtacgtggacggcgtggaggtgcataatgccaagacaaagccgtgcgaggagcagtacggcagcacgtaccgttgcgtcagcgtcctcaccgtcctgcaccaggactggctgaatggcaaggagtacaagtgcaaggtgtccaacaaagccctcccagcccccatcgagaaaaccatctccaaagccaaagggcagccccgagaaccacaggtgtacaccctgcccccatcccgggaggagatgaccaagaaccaggtcagcctgacctgcctggtcaaaggcttctatcccagcgacatcgccgtggagtgggagagcaatgggcagccggagaacaactacaagaccacgcctcccgtgctggactccgacggctccttcttcctctatagcaagctcaccgtggacaagagcaggtggcagcaggggaacgtcttctcatgctccgtgatgcatgaggctctgcacaaccactacacgcagaagagcctctccctgtctccgggcaaatag

SEQ ID NO: 1931 - protein, 452 aa, synthetic construct
  REGION 1..452: note = Synthetic
QVQLVQSGAEVKKPGASVKVSCKASGYTFTGYYMHWVRQAPGQGLEWMGWFKPNSGVTNYAQKFQGRVTMTRDTSISTAYMELSSLRSDDTAVYYCARAGYSTSHKDWFDPWGQGTLVTVSSASTKGPSVFPLAPSSKSTSGGTAALGCLVKDYFPEPVTVSWNSGALTSGVHTFPAVLQSSGLYSLSSVVTVPSSSLGTQTYICNVNHKPSNTKVDKKVEPKSCDKTHTCPPCPAPELLGGPSVFLFPPKPKDTLMISRTPEVTCVVVDVSHEDPEVKFNWYVDGVEVHNAKTKPCEEQYGSTYRCVSVLTVLHQDWLNGKEYKCKVSNKALPAPIEKTISKAKGQPREPQVYTLPPSREEMTKNQVSLTCLVKGFYPSDIAVEWESNGQPENNYKTTPPVLDSDGSFFLYSKLTVDKSRWQQGNVFSCSVMHEALHNHYTQKSLSLSPGK

SEQ ID NO: 1932 - DNA, 1425 bp, synthetic construct
  misc_feature 1..1425: note = Synthetic
  source 1..1425: mol_type = other DNA
atggacatgagggtgcccgctcagctcctggggctcctgctgctgtggctgagaggtgcgcgctgtcaggtgcagctggtgcagtctggggctgaggtgaagaagcctggggcctcagtgaaggtgtcctgcaaggcttctggatacaccttcaccggctactatatgcactgggtgcgacaggcccctggacaagggcttgagtggatgggatggttcaaacctaatagtggtgtcacaaactatgcacagaagtttcagggcagggtcaccatgactagggacacgtccatcagcacagcctacatggagctgagcagcctgagatctgacgacacggccgtgtattactgtgcgagagccggatacagcaccagtcataaagactggttcgacccctggggccagggaaccctggtcaccgtgtcttcagcctccaccaagggcccatcggtcttccccctggcaccctcctccaagagcacctctgggggcacagcggccctgggctgcctggtcaaggactacttccccgaaccggtgacggtgtcgtggaactcaggcgccctgaccagcggcgtgcacaccttcccggctgtcctacagtcctcaggactctactccctcagcagcgtggtgaccgtgccctccagcagcttgggcacccagacctacatctgcaacgtgaatcacaagcccagcaacaccaaggtggacaagaaagttgagcccaaatcttgtgacaaaactcacacatgcccaccgtgcccagcacctgaactcctggggggaccgtcagtcttcctcttccccccaaaacccaaggacaccctcatgatctcccggacccctgaggtcacatgcgtggtggtggacgtgagccacgaagaccctgaggtcaagttcaactggtacgtggacggcgtggaggtgcataatgccaagacaaagccgtgcgaggagcagtacggcagcacgtaccgttgcgtcagcgtcctcaccgtcctgcaccaggactggctgaatggcaaggagtacaagtgcaaggtgtccaacaaagccctcccagcccccatcgagaaaaccatctccaaagccaaagggcagccccgagaaccacaggtgtacaccctgcccccatcccgggaggagatgaccaagaaccaggtcagcctgacctgcctggtcaaaggcttctatcccagcgacatcgccgtggagtgggagagcaatgggcagccggagaacaactacaagaccacgcctcccgtgctggactccgacggctccttcttcctctatagcaagctcaccgtggacaagagcaggtggcagcaggggaacgtcttctcatgctccgtgatgcatgaggctctgcacaaccactacacgcagaagagcctctccctgtctccgggcaaatag

SEQ ID NO: 1933 - protein, 452 aa, synthetic construct
  REGION 1..452: note = Synthetic
QVQLVQSGAEVKKPGASVKVSCKASGYTFTGYYMHWVRQAPGQGLEWMGWFKPNSGVTNYAQKFQGRVTMTRDTSISTAYMELSSLRSDDTAVYYCARAGYSTSFKDWFDPWGQGTLVTVSSASTKGPSVFPLAPSSKSTSGGTAALGCLVKDYFPEPVTVSWNSGALTSGVHTFPAVLQSSGLYSLSSVVTVPSSSLGTQTYICNVNHKPSNTKVDKKVEPKSCDKTHTCPPCPAPELLGGPSVFLFPPKPKDTLMISRTPEVTCVVVDVSHEDPEVKFNWYVDGVEVHNAKTKPCEEQYGSTYRCVSVLTVLHQDWLNGKEYKCKVSNKALPAPIEKTISKAKGQPREPQVYTLPPSREEMTKNQVSLTCLVKGFYPSDIAVEWESNGQPENNYKTTPPVLDSDGSFFLYSKLTVDKSRWQQGNVFSCSVMHEALHNHYTQKSLSLSPGK

SEQ ID NO: 1934 - DNA, 1425 bp, synthetic construct
  misc_feature 1..1425: note = Synthetic
  source 1..1425: mol_type = other DNA
atggacatgagggtgcccgctcagctcctggggctcctgctgctgtggctgagaggtgcgcgctgtcaggtgcagctggtgcagtctggggctgaggtgaagaagcctggggcctcagtgaaggtgtcctgcaaggcttctggatacaccttcaccggctactatatgcactgggtgcgacaggcccctggacaagggcttgagtggatgggatggttcaaacctaatagtggtgtcacaaactatgcacagaagtttcagggcagggtcaccatgactagggacacgtccatcagcacagcctacatggagctgagcagcctgagatctgacgacacggccgtgtattactgtgcgagagccggatacagcaccagttttaaagactggttcgacccctggggccagggaaccctggtcaccgtgtcttcagcctccaccaagggcccatcggtcttccccctggcaccctcctccaagagcacctctgggggcacagcggccctgggctgcctggtcaaggactacttccccgaaccggtgacggtgtcgtggaactcaggcgccctgaccagcggcgtgcacaccttcccggctgtcctacagtcctcaggactctactccctcagcagcgtggtgaccgtgccctccagcagcttgggcacccagacctacatctgcaacgtgaatcacaagcccagcaacaccaaggtggacaagaaagttgagcccaaatcttgtgacaaaactcacacatgcccaccgtgcccagcacctgaactcctggggggaccgtcagtcttcctcttccccccaaaacccaaggacaccctcatgatctcccggacccctgaggtcacatgcgtggtggtggacgtgagccacgaagaccctgaggtcaagttcaactggtacgtggacggcgtggaggtgcataatgccaagacaaagccgtgcgaggagcagtacggcagcacgtaccgttgcgtcagcgtcctcaccgtcctgcaccaggactggctgaatggcaaggagtacaagtgcaaggtgtccaacaaagccctcccagcccccatcgagaaaaccatctccaaagccaaagggcagccccgagaaccacaggtgtacaccctgcccccatcccgggaggagatgaccaagaaccaggtcagcctgacctgcctggtcaaaggcttctatcccagcgacatcgccgtggagtgggagagcaatgggcagccggagaacaactacaagaccacgcctcccgtgctggactccgacggctccttcttcctctatagcaagctcaccgtggacaagagcaggtggcagcaggggaacgtcttctcatgctccgtgatgcatgaggctctgcacaaccactacacgcagaagagcctctccctgtctccgggcaaatag

SEQ ID NO: 1935 - protein, 452 aa, synthetic construct
  REGION 1..452: note = Synthetic
QVQLVQSGAEVKKPGASVKVSCKASGYTFTGYYMHWVRQAPGQGLEWMGWFKPNSGVTNYAQKFQGRVTMTRDTSISTAYMELSSLRSDDTAVYYCARAGYSTSWKDWFDPWGQGTLVTVSSASTKGPSVFPLAPSSKSTSGGTAALGCLVKDYFPEPVTVSWNSGALTSGVHTFPAVLQSSGLYSLSSVVTVPSSSLGTQTYICNVNHKPSNTKVDKKVEPKSCDKTHTCPPCPAPELLGGPSVFLFPPKPKDTLMISRTPEVTCVVVDVSHEDPEVKFNWYVDGVEVHNAKTKPCEEQYGSTYRCVSVLTVLHQDWLNGKEYKCKVSNKALPAPIEKTISKAKGQPREPQVYTLPPSREEMTKNQVSLTCLVKGFYPSDIAVEWESNGQPENNYKTTPPVLDSDGSFFLYSKLTVDKSRWQQGNVFSCSVMHEALHNHYTQKSLSLSPGK

SEQ ID NO: 1936 - DNA, 1425 bp, synthetic construct
  misc_feature 1..1425: note = Synthetic
  source 1..1425: mol_type = other DNA
atggacatgagggtgcccgctcagctcctggggctcctgctgctgtggctgagaggtgcgcgctgtcaggtgcagctggtgcagtctggggctgaggtgaagaagcctggggcctcagtgaaggtgtcctgcaaggcttctggatacaccttcaccggctactatatgcactgggtgcgacaggcccctggacaagggcttgagtggatgggatggttcaaacctaatagtggtgtcacaaactatgcacagaagtttcagggcagggtcaccatgactagggacacgtccatcagcacagcctacatggagctgagcagcctgagatctgacgacacggccgtgtattactgtgcgagagccggatacagcaccagttggaaagactggttcgacccctggggccagggaaccctggtcaccgtgtcttcagcctccaccaagggcccatcggtcttccccctggcaccctcctccaagagcacctctgggggcacagcggccctgggctgcctggtcaaggactacttccccgaaccggtgacggtgtcgtggaactcaggcgccctgaccagcggcgtgcacaccttcccggctgtcctacagtcctcaggactctactccctcagcagcgtggtgaccgtgccctccagcagcttgggcacccagacctacatctgcaacgtgaatcacaagcccagcaacaccaaggtggacaagaaagttgagcccaaatcttgtgacaaaactcacacatgcccaccgtgcccagcacctgaactcctggggggaccgtcagtcttcctcttccccccaaaacccaaggacaccctcatgatctcccggacccctgaggtcacatgcgtggtggtggacgtgagccacgaagaccctgaggtcaagttcaactggtacgtggacggcgtggaggtgcataatgccaagacaaagccgtgcgaggagcagtacggcagcacgtaccgttgcgtcagcgtcctcaccgtcctgcaccaggactggctgaatggcaaggagtacaagtgcaaggtgtccaacaaagccctcccagcccccatcgagaaaaccatctccaaagccaaagggcagccccgagaaccacaggtgtacaccctgcccccatcccgggaggagatgaccaagaaccaggtcagcctgacctgcctggtcaaaggcttctatcccagcgacatcgccgtggagtgggagagcaatgggcagccggagaacaactacaagaccacgcctcccgtgctggactccgacggctccttcttcctctatagcaagctcaccgtggacaagagcaggtggcagcaggggaacgtcttctcatgctccgtgatgcatgaggctctgcacaaccactacacgcagaagagcctctccctgtctccgggcaaatag

SEQ ID NO: 1937 - protein, 452 aa, synthetic construct; identical to SEQ ID NO: 1935
  REGION 1..452: note = Synthetic

SEQ ID NO: 1938 - DNA, 1425 bp, synthetic construct; identical to SEQ ID NO: 1936
  misc_feature 1..1425: note = Synthetic
  source 1..1425: mol_type = other DNA

SEQ ID NO: 1939 - protein, 454 aa, synthetic construct; identical to SEQ ID NO: 1907
  REGION 1..454: note = Synthetic

SEQ ID NO: 1940 - DNA, 1431 bp, synthetic construct; identical to SEQ ID NO: 1908
  misc_feature 1..1431: note = Synthetic
  source 1..1431: mol_type = other DNA

SEQ ID NO: 1941 - protein, 454 aa, synthetic construct; identical to SEQ ID NO: 1907
  REGION 1..454: note = Synthetic

SEQ ID NO: 1942 - DNA, 1431 bp, synthetic construct; identical to SEQ ID NO: 1908
  misc_feature 1..1431: note = Synthetic
  source 1..1431: mol_type = other DNA

SEQ ID NO: 1943 - protein, 454 aa, synthetic construct; identical to SEQ ID NO: 1907
  REGION 1..454: note = Synthetic

SEQ ID NO: 1944 - DNA, 1431 bp, synthetic construct; identical to SEQ ID NO: 1908
  misc_feature 1..1431: note = Synthetic
  source 1..1431: mol_type = other DNA

SEQ ID NO: 1945 - protein, 453 aa, synthetic construct
  REGION 1..453: note = Synthetic
QVQLVQSGAEVKKPGASVKVSCKASGYTFTSYDINWVRQATGQGLEWMGWMNPNSGNSGSVKKFRDRVTMTRDTSISTAYMELSSLRSEDTAVYYCVRLIGYSSAYKWSFQHWGQGTLVTVSSASTKGPSVFPLAPSSKSTSGGTAALGCLVKDYFPEPVTVSWNSGALTSGVHTFPAVLQSSGLYSLSSVVTVPSSSLGTQTYICNVNHKPSNTKVDKKVEPKSCDKTHTCPPCPAPELLGGPSVFLFPPKPKDTLMISRTPEVTCVVVDVSHEDPEVKFNWYVDGVEVHNAKTKPCEEQYGSTYRCVSVLTVLHQDWLNGKEYKCKVSNKALPAPIEKTISKAKGQPREPQVYTLPPSREEMTKNQVSLTCLVKGFYPSDIAVEWESNGQPENNYKTTPPVLDSDGSFFLYSKLTVDKSRWQQGNVFSCSVMHEALHNHYTQKSLSLSPGK

SEQ ID NO: 1946 - DNA, 1428 bp, synthetic construct
  misc_feature 1..1428: note = Synthetic
  source 1..1428: mol_type = other DNA
atggacatgagggtgcccgctcagctcctggggctcctgctgctgtggctgagaggtgcgcgctgtcaggtgcagctggtgcagtctggggctgaggtgaagaagcctggggcctcagtgaaggtgtcctgcaaggcttctggatacaccttcaccagttatgatatcaattgggtgcgacaggccactggacaagggcttgagtggatgggatggatgaaccctaacagtggtaactcaggctctgtaaagaagttccgggacagagtcaccatgaccagggacacctccatcagcactgcctacatggaattgagcagcctgagatctgaggacacggccgtgtattactgtgtgagacttatcgggtatagcagtgcctataagtggtccttccagcactggggccagggcaccctggtcaccgtgtcctcagcctccaccaagggcccatcggtcttccccctggcaccctcctccaagagcacctctgggggcacagcggccctgggctgcctggtcaaggactacttccccgaaccggtgacggtgtcgtggaactcaggcgccctgaccagcggcgtgcacaccttcccggctgtcctacagtcctcaggactctactccctcagcagcgtggtgaccgtgccctccagcagcttgggcacccagacctacatctgcaacgtgaatcacaagcccagcaacaccaaggtggacaagaaagttgagcccaaatcttgtgacaaaactcacacatgcccaccgtgcccagcacctgaactcctggggggaccgtcagtcttcctcttccccccaaaacccaaggacaccctcatgatctcccggacccctgaggtcacatgcgtggtggtggacgtgagccacgaagaccctgaggtcaagttcaactggtacgtggacggcgtggaggtgcataatgccaagacaaagccgtgcgaggagcagtacggcagcacgtaccgttgcgtcagcgtcctcaccgtcctgcaccaggactggctgaatggcaaggagtacaagtgcaaggtgtccaacaaagccctcccagcccccatcgagaaaaccatctccaaagccaaagggcagccccgagaaccacaggtgtacaccctgcccccatcccgggaggagatgaccaagaaccaggtcagcctgacctgcctggtcaaaggcttctatcccagcgacatcgccgtggagtgggagagcaatgggcagccggagaacaactacaagaccacgcctcccgtgctggactccgacggctccttcttcctctatagcaagctcaccgtggacaagagcaggtggcagcaggggaacgtcttctcatgctccgtgatgcatgaggctctgcacaaccactacacgcagaagagcctctccctgtctccgggcaaatag

SEQ ID NO: 1947 - protein, 453 aa, synthetic construct; identical to SEQ ID NO: 1945
  REGION 1..453: note = Synthetic

SEQ ID NO: 1948 - DNA, 1428 bp, synthetic construct; identical to SEQ ID NO: 1946
  misc_feature 1..1428: note = Synthetic
  source 1..1428: mol_type = other DNA

SEQ ID NO: 1949 - protein, 453 aa, synthetic construct
  REGION 1..453: note = Synthetic
QVQLVQSGAEVKKPGASVKVSCKASGYTFTSYDINWVRQATGQGLEWMGWMNPNSGNSGSVKKFRDRVTMTRDTSISTAYMELSSLRSEDTAVYYCVRLIGYSSAFKWSFQHWGQGTLVTVSSASTKGPSVFPLAPSSKSTSGGTAALGCLVKDYFPEPVTVSWNSGALTSGVHTFPAVLQSSGLYSLSSVVTVPSSSLGTQTYICNVNHKPSNTKVDKKVEPKSCDKTHTCPPCPAPELLGGPSVFLFPPKPKDTLMISRTPEVTCVVVDVSHEDPEVKFNWYVDGVEVHNAKTKPCEEQYGSTYRCVSVLTVLHQDWLNGKEYKCKVSNKALPAPIEKTISKAKGQPREPQVYTLPPSREEMTKNQVSLTCLVKGFYPSDIAVEWESNGQPENNYKTTPPVLDSDGSFFLYSKLTVDKSRWQQGNVFSCSVMHEALHNHYTQKSLSLSPGK

SEQ ID NO: 1950 - DNA, 1428 bp, synthetic construct
  misc_feature 1..1428: note = Synthetic
  source 1..1428: mol_type = other DNA
atggacatgagggtgcccgctcagctcctggggctcctgctgctgtggctgagaggtgcgcgctgtcaggtgcagctggtgcagtctggggctgaggtgaagaagcctggggcctcagtgaaggtgtcctgcaaggcttctggatacaccttcaccagttatgatatcaattgggtgcgacaggccactggacaagggcttgagtggatgggatggatgaaccctaacagtggtaactcaggctctgtaaagaagttccgggacagagtcaccatgaccagggacacctccatcagcactgcctacatggaattgagcagcctgagatctgaggacacggccgtgtattactgtgtgagacttatcgggtatagcagtgcctttaagtggtccttccagcactggggccagggcaccctggtcaccgtgtcctcagcctccaccaagggcccatcggtcttccccctggcaccctcctccaagagcacctctgggggcacagcggccctgggctgcctggtcaaggactacttccccgaaccggtgacggtgtcgtggaactcaggcgccctgaccagcggcgtgcacaccttcccggctgtcctacagtcctcaggactctactccctcagcagcgtggtgaccgtgccctccagcagcttgggcacccagacctacatctgcaacgtgaatcacaagcccagcaacaccaaggtggacaagaaagttgagcccaaatcttgtgacaaaactcacacatgcccaccgtgcccagcacctgaactcctggggggaccgtcagtcttcctcttccccccaaaacccaaggacaccctcatgatctcccggacccctgaggtcacatgcgtggtggtggacgtgagccacgaagaccctgaggtcaagttcaactggtacgtggacggcgtggaggtgcataatgccaagacaaagccgtgcgaggagcagtacggcagcacgtaccgttgcgtcagcgtcctcaccgtcctgcaccaggactggctgaatggcaaggagtacaagtgcaaggtgtccaacaaagccctcccagcccccatcgagaaaaccatctccaaagccaaagggcagccccgagaaccacaggtgtacaccctgcccccatcccgggaggagatgaccaagaaccaggtcagcctgacctgcctggtcaaaggcttctatcccagcgacatcgccgtggagtgggagagcaatgggcagccggagaacaactacaagaccacgcctcccgtgctggactccgacggctccttcttcctctatagcaagctcaccgtggacaagagcaggtggcagcaggggaacgtcttctcatgctccgtgatgcatgaggctctgcacaaccactacacgcagaagagcctctccctgtctccgggcaaatag

SEQ ID NO: 1951 - protein, 453 aa, synthetic construct; identical to SEQ ID NO: 1949
  REGION 1..453: note = Synthetic

SEQ ID NO: 1952 - DNA, 1428 bp, synthetic construct; identical to SEQ ID NO: 1950
  misc_feature 1..1428: note = Synthetic
  source 1..1428: mol_type = other DNA

SEQ ID NO: 1953 - protein, 453 aa, synthetic construct
  REGION 1..453: note = Synthetic
QVQLVQSGAEVKKPGASVKVSCKASGYTFTSYDINWVRQATGQGLEWMGWMNPNSGNSGSVKKFRDRVTMTRDTSTSTAYMELSSLRSEDTAVYYCVRLIGYSSAYKWSFQHWGQGTLVTVSSASTKGPSVFPLAPSSKSTSGGTAALGCLVKDYFPEPVTVSWNSGALTSGVHTFPAVLQSSGLYSLSSVVTVPSSSLGTQTYICNVNHKPSNTKVDKKVEPKSCDKTHTCPPCPAPELLGGPSVFLFPPKPKDTLMISRTPEVTCVVVDVSHEDPEVKFNWYVDGVEVHNAKTKPCEEQYGSTYRCVSVLTVLHQDWLNGKEYKCKVSNKALPAPIEKTISKAKGQPREPQVYTLPPSREEMTKNQVSLTCLVKGFYPSDIAVEWESNGQPENNYKTTPPVLDSDGSFFLYSKLTVDKSRWQQGNVFSCSVMHEALHNHYTQKSLSLSPGK

SEQ ID NO: 1954 - DNA, 1428 bp, synthetic construct
  misc_feature 1..1428: note = Synthetic
  source 1..1428: mol_type = other DNA
atggacatgagggtgcccgctcagctcctggggctcctgctgctgtggctgagaggtgcgcgctgtcaggtgcagctggtgcagtctggggctgaggtgaagaagcctggggcctcagtgaaggtgtcctgcaaggcttctggatacaccttcaccagttatgatatcaattgggtgcgacaggccactggacaagggcttgagtggatgggatggatgaaccctaacagtggtaactcaggctctgtaaagaagttccgggacagagtcaccatgaccagggacacctccactagcactgcctacatggaattgagcagcctgagatctgaggacacggccgtgtattactgtgtgagacttatcgggtatagcagtgcctataagtggtccttccagcactggggccagggcaccctggtcaccgtgtcctcagcctccaccaagggcccatcggtcttccccctggcaccctcctccaagagcacctctgggggcacagcggccctgggctgcctggtcaaggactacttccccgaaccggtgacggtgtcgtggaactcaggcgccctgaccagcggcgtgcacaccttcccggctgtcctacagtcctcaggactctactccctcagcagcgtggtgaccgtgccctccagcagcttgggcacccagacctacatctgcaacgtgaatcacaagcccagcaacaccaaggtggacaagaaagttgagcccaaatcttgtgacaaaactcacacatgcccaccgtgcccagcacctgaactcctggggggaccgtcagtcttcctcttccccccaaaacccaaggacaccctcatgatctcccggacccctgaggtcacatgcgtggtggtggacgtgagccacgaagaccctgaggtcaagttcaactggtacgtggacggcgtggaggtgcataatgccaagacaaagccgtgcgaggagcagtacggcagcacgtaccgttgcgtcagcgtcctcaccgtcctgcaccaggactggctgaatggcaaggagtacaagtgcaaggtgtccaacaaagccctcccagcccccatcgagaaaaccatctccaaagccaaagggcagccccgagaaccacaggtgtacaccctgcccccatcccgggaggagatgaccaagaaccaggtcagcctgacctgcctggtcaaaggcttctatcccagcgacatcgccgtggagtgggagagcaatgggcagccggagaacaactacaagaccacgcctcccgtgctggactccgacggctccttcttcctctatagcaagctcaccgtggacaagagcaggtggcagcaggggaacgtcttctcatgctccgtgatgcatgaggctctgcacaaccactacacgcagaagagcctctccctgtctccgggcaaatag

SEQ ID NO: 1955 - protein, 453 aa, synthetic construct
  REGION 1..453: note = Synthetic
QVQLVQSGAEVKKPGASVKVSCKASGYTFTSYDINWVRQATGQGLEWMGWMNPNSGNSGSVKKFRDRVTMTRDTSTSTAYMELSSLRSEDTAVYYCVRLIGYSSAWKWSFQHWGQGTLVTVSSASTKGPSVFPLAPSSKSTSGGTAALGCLVKDYFPEPVTVSWNSGALTSGVHTFPAVLQSSGLYSLSSVVTVPSSSLGTQTYICNVNHKPSNTKVDKKVEPKSCDKTHTCPPCPAPELLGGPSVFLFPPKPKDTLMISRTPEVTCVVVDVSHEDPEVKFNWYVDGVEVHNAKTKPCEEQYGSTYRCVSVLTVLHQDWLNGKEYKCKVSNKALPAPIEKTISKAKGQPREPQVYTLPPSREEMTKNQVSLTCLVKGFYPSDIAVEWESNGQPENNYKTTPPVLDSDGSFFLYSKLTVDKSRWQQGNVFSCSVMHEALHNHYTQKSLSLSPGK

SEQ ID NO: 1956 - DNA, 1428 bp, synthetic construct
  misc_feature 1..1428: note = Synthetic
  source 1..1428: mol_type = other DNA
atggacatgagggtgcccgctcagctcctggggctcctgctgctgtggctgagaggtgcgcgctgtcaggtgcagctggtgcagtctggggctgaggtgaagaagcctggggcctcagtgaaggtgtcctgcaaggcttctggatacaccttcaccagttatgatatcaattgggtgcgacaggccactggacaagggcttgagtggatgggatggatgaaccctaacagtggtaactcaggctctgtaaagaagttccgggacagagtcaccatgaccagggacacctccactagcactgcctacatggaattgagcagcctgagatctgaggacacggccgtgtattactgtgtgagacttatcgggtatagcagtgcctggaagtggtccttccagcactggggccagggcaccctggtcaccgtgtcctcagcctccaccaagggcccatcggtcttccccctggcaccctcctccaagagcacctctgggggcacagcggccctgggctgcctggtcaaggactacttccccgaaccggtgacggtgtcgtggaactcaggcgccctgaccagcggcgtgcacaccttcccggctgtcctacagtcctcaggactctactccctcagcagcgtggtgaccgtgccctccagcagcttgggcacccagacctacatctgcaacgtgaatcacaagcccagcaacaccaaggtggacaagaaagttgagcccaaatcttgtgacaaaactcacacatgcccaccgtgcccagcacctgaactcctggggggaccgtcagtcttcctcttccccccaaaacccaaggacaccctcatgatctcccggacccctgaggtcacatgcgtggtggtggacgtgagccacgaagaccctgaggtcaagttcaactggtacgtggacggcgtggaggtgcataatgccaagacaaagccgtgcgaggagcagtacggcagcacgtaccgttgcgtcagcgtcctcaccgtcctgcaccaggactggctgaatggcaaggagtacaagtgcaaggtgtccaacaaagccctcccagcccccatcgagaaaaccatctccaaagccaaagggcagccccgagaaccacaggtgtacaccctgcccccatcccgggaggagatgaccaagaaccaggtcagcctgacctgcctggtcaaaggcttctatcccagcgacatcgccgtggagtgggagagcaatgggcagccggagaacaactacaagaccacgcctcccgtgctggactccgacggctccttcttcctctatagcaagctcaccgtggacaagagcaggtggcagcaggggaacgtcttctcatgctccgtgatgcatgaggctctgcacaaccactacacgcagaagagcctctccctgtctccgggcaaatag

SEQ ID NO: 1957 - protein, 453 aa, synthetic construct; identical to SEQ ID NO: 1903
  REGION 1..453: note = Synthetic

SEQ ID NO: 1958 - DNA, 1428 bp, synthetic construct; identical to SEQ ID NO: 1904
  misc_feature 1..1428: note = Synthetic
  source 1..1428: mol_type = other DNA

SEQ ID NO: 1959 - protein, 453 aa, synthetic construct; identical to SEQ ID NO: 1903
  REGION 1..453: note = Synthetic

SEQ ID NO: 1960 - DNA, 1428 bp, synthetic construct; identical to SEQ ID NO: 1904
  misc_feature 1..1428: note = Synthetic
  source 1..1428: mol_type = other DNA

SEQ ID NO: 1961 - protein, 447 aa, synthetic construct
  REGION 1..447: note = Synthetic
EVQLVESGGGLVQPGGSLRLSCAASGFTFSSYWMSWVRQAPGKGLEWVANIKQDGSEEYYVDSVKGRFTISRDNAKNSLYLQMNSLRAEDTAVYYCARDYGDVFDYWGQGTLVTVSSASTKGPSVFPLAPSSKSTSGGTAALGCLVKDYFPEPVTVSWNSGALTSGVHTFPAVLQSSGLYSLSSVVTVPSSSLGTQTYICNVNHKPSNTKVDKKVEPKSCDKTHTCPPCPAPELLGGPSVFLFPPKPKDTLMISRTPEVTCVVVDVSHEDPEVKFNWYVDGVEVHNAKTKPCEEQYGSTYRCVSVLTVLHQDWLNGKEYKCKVSNKALPAPIEKTISKAKGQPREPQVYTLPPSREEMTKNQVSLTCLVKGFYPSDIAVEWESNGQPENNYKTTPPVLDSDGSFFLYSKLTVDKSRWQQGNVFSCSVMHEALHNHYTQKSLSLSPGK

SEQ ID NO: 1962 - DNA, 1410 bp, synthetic construct
  misc_feature 1..1410: note = Synthetic
  source 1..1410: mol_type = other DNA
atggacatgagggtgcccgctcagctcctggggctcctgctgctgtggctgagaggtgcgcgctgtgaggtgcagctggtggagtctgggggaggcttggtccagccgggggggtccctgagactctcctgtgcagcctctggattcacctttagtagctattggatgagctgggtccgccaggctccagggaaggggctggagtgggtggccaacatcaagcaagatggaagtgaggaatattatgtggactctgtgaagggccgattcaccatctccagagacaacgccaagaactcactgtatctgcaaatgaacagcctgagagccgaggacacggctgtgtattactgtgcgagagactacggtgacgtttttgactactggggccagggaaccctggtcaccgtgtcctcagcctccaccaagggcccatcggtcttccccctggcaccctcctccaagagcacctctgggggcacagcggccctgggctgcctggtcaaggactacttccccgaaccggtgacggtgtcgtggaactcaggcgccctgaccagcggcgtgcacaccttcccggctgtcctacagtcctcaggactctactccctcagcagcgtggtgaccgtgccctccagcagcttgggcacccagacctacatctgcaacgtgaatcacaagcccagcaacaccaaggtggacaagaaagttgagcccaaatcttgtgacaaaactcacacatgcccaccgtgcccagcacctgaactcctggggggaccgtcagtcttcctcttccccccaaaacccaaggacaccctcatgatctcccggacccctgaggtcacatgcgtggtggtggacgtgagccacgaagaccctgaggtcaagttcaactggtacgtggacggcgtggaggtgcataatgccaagacaaagccgtgcgaggagcagtacggcagcacgtaccgttgcgtcagcgtcctcaccgtcctgcaccaggactggctgaatggcaaggagtacaagtgcaaggtgtccaacaaagccctcccagcccccatcgagaaaaccatctccaaagccaaagggcagccccgagaaccacaggtgtacaccctgcccccatcccgggaggagatgaccaagaaccaggtcagcctgacctgcctggtcaaaggcttctatcccagcgacatcgccgtggagtgggagagcaatgggcagccggagaacaactacaagaccacgcctcccgtgctggactccgacggctccttcttcctctatagcaagctcaccgtggacaagagcaggtggcagcaggggaacgtcttctcatgctccgtgatgcatgaggctctgcacaaccactacacgcagaagagcctctccctgtctccgggcaaatag

SEQ ID NO: 1963 - protein, 447 aa, synthetic construct
  REGION 1..447: note = Synthetic
EVQLVESGGGLVQPGGSLRLSCAASGFTFSSYWMSWVRQAPGKGLEWVANIKQDGSEEYYVDSVKGRFTISRDNAKNSLYLQMNSLRAEDTAVYYCARDYGDAFDYWGQGTLVTVSSASTKGPSVFPLAPSSKSTSGGTAALGCLVKDYFPEPVTVSWNSGALTSGVHTFPAVLQSSGLYSLSSVVTVPSSSLGTQTYICNVNHKPSNTKVDKKVEPKSCDKTHTCPPCPAPELLGGPSVFLFPPKPKDTLMISRTPEVTCVVVDVSHEDPEVKFNWYVDGVEVHNAKTKPCEEQYGSTYRCVSVLTVLHQDWLNGKEYKCKVSNKALPAPIEKTISKAKGQPREPQVYTLPPSREEMTKNQVSLTCLVKGFYPSDIAVEWESNGQPENNYKTTPPVLDSDGSFFLYSKLTVDKSRWQQGNVFSCSVMHEALHNHYTQKSLSLSPGK

SEQ ID NO: 1964 - DNA, 1410 bp, synthetic construct
  misc_feature 1..1410: note = Synthetic
  source 1..1410: mol_type = other DNA
atggacatgagggtgcccgctcagctcctggggctcctgctgctgtggctgagaggtgcgcgctgtgaggtgcagctggtggagtctgggggaggcttggtccagccgggggggtccctgagactctcctgtgcagcctctggattcacctttagtagctattggatgagctgggtccgccaggctccagggaaggggctggagtgggtggccaacatcaagcaagatggaagtgaggaatattatgtggactctgtgaagggccgattcaccatctccagagacaacgccaagaactcactgtatctgcaaatgaacagcctgagagccgaggacacggctgtgtattactgtgcgagagactacggtgacgcttttgactactggggccagggaaccctggtcaccgtgtcctcagcctccaccaagggcccatcggtcttccccctggcaccctcctccaagagcacctctgggggcacagcggccctgggctgcctggtcaaggactacttccccgaaccggtgacggtgtcgtggaactcaggcgccctgaccagcggcgtgcacaccttcccggctgtcctacagtcctcaggactctactccctcagcagcgtggtgaccgtgccctccagcagcttgggcacccagacctacatctgcaacgtgaatcacaagcccagcaacaccaaggtggacaagaaagttgagcccaaatcttgtgacaaaactcacacatgcccaccgtgcccagcacctgaactcctggggggaccgtcagtcttcctcttccccccaaaacccaaggacaccctcatgatctcccggacccctgaggtcacatgcgtggtggtggacgtgagccacgaagaccctgaggtcaagttcaactggtacgtggacggcgtggaggtgcataatgccaagacaaagccgtgcgaggagcagtacggcagcacgtaccgttgcgtcagcgtcctcaccgtcctgcaccaggactggctgaatggcaaggagtacaagtgcaaggtgtccaacaaagccctcccagcccccatcgagaaaaccatctccaaagccaaagggcagccccgagaaccacaggtgtacaccctgcccccatcccgggaggagatgaccaagaaccaggtcagcctgacctgcctggtcaaaggcttctatcccagcgacatcgccgtggagtgggagagcaatgggcagccggagaacaactacaagaccacgcctcccgtgctggactccgacggctccttcttcctctatagcaagctcaccgtggacaagagcaggtggcagcaggggaacgtcttctcatgctccgtgatgcatgaggctctgcacaaccactacacgcagaagagcctctccctgtctccgggcaaatag

SEQ ID NO: 1965 - protein, 447 aa, synthetic construct
  REGION 1..447: note = Synthetic
EVQLVESGGGLVQPGGSLRLSCAASGFTFSSYWMSWVRQAPGKGLEWVANIKQDGSEEYYVDSVKGRFTISRDNAKNSLYLQMNSLRAEDTAVYYCARDYGESFDYWGQGTLVTVSSASTKGPSVFPLAPSSKSTSGGTAALGCLVKDYFPEPVTVSWNSGALTSGVHTFPAVLQSSGLYSLSSVVTVPSSSLGTQTYICNVNHKPSNTKVDKKVEPKSCDKTHTCPPCPAPELLGGPSVFLFPPKPKDTLMISRTPEVTCVVVDVSHEDPEVKFNWYVDGVEVHNAKTKPCEEQYGSTYRCVSVLTVLHQDWLNGKEYKCKVSNKALPAPIEKTISKAKGQPREPQVYTLPPSREEMTKNQVSLTCLVKGFYPSDIAVEWESNGQPENNYKTTPPVLDSDGSFFLYSKLTVDKSRWQQGNVFSCSVMHEALHNHYTQKSLSLSPGK

SEQ ID NO: 1966 - DNA, 1410 bp, synthetic construct
  misc_feature 1..1410: note = Synthetic
  source 1..1410: mol_type = other DNA
atggacatgagggtgcccgctcagctcctggggctcctgctgctgtggctgagaggtgcgcgctgtgaggtgcagctggtggagtctgggggaggcttggtccagccgggggggtccctgagactctcctgtgcagcctctggattcacctttagtagctattggatgagctgggtccgccaggctccagggaaggggctggagtgggtggccaacatcaagcaagatggaagtgaggaatattatgtggactctgtgaagggccgattcaccatctccagagacaacgccaagaactcactgtatctgcaaatgaacagcctgagagccgaggacacggctgtgtattactgtgcgagagactacggtgaatcctttgactactggggccagggaaccctggtcaccgtgtcctcagcctccaccaagggcccatcggtcttccccctggcaccctcctccaagagcacctctgggggcacagcggccctgggctgcctggtcaaggactacttccccgaaccggtgacggtgtcgtggaactcaggcgccctgaccagcggcgtgcacaccttcccggctgtcctacagtcctcaggactctactccctcagcagcgtggtgaccgtgccctccagcagcttgggcacccagacctacatctgcaacgtgaatcacaagcccagcaacaccaaggtggacaagaaagttgagcccaaatcttgtgacaaaactcacacatgcccaccgtgcccagcacctgaactcctggggggaccgtcagtcttcctcttccccccaaaacccaaggacaccctcatgatctcccggacccctgaggtcacatgcgtggtggtggacgtgagccacgaagaccctgaggtcaagttcaactggtacgtggacggcgtggaggtgcataatgccaagacaaagccgtgcgaggagcagtacggcagcacgtaccgttgcgtcagcgtcctcaccgtcctgcaccaggactggctgaatggcaaggagtacaagtgcaaggtgtccaacaaagccctcccagcccccatcgagaaaaccatctccaaagccaaagggcagccccgagaaccacaggtgtacaccctgcccccatcccgggaggagatgaccaagaaccaggtcagcctgacctgcctggtcaaaggcttctatcccagcgacatcgccgtggagtgggagagcaatgggcagccggagaacaactacaagaccacgcctcccgtgctggactccgacggctccttcttcctctatagcaagctcaccgtggacaagagcaggtggcagcaggggaacgtcttctcatgctccgtgatgcatgaggctctgcacaaccactacacgcagaagagcctctccctgtctccgggcaaatag

SEQ ID NO: 1967 - protein, 452 aa, synthetic construct
  REGION 1..452: note = Synthetic
QVQLVQSGAEVKKPGASVKVSCKASGYTFTRYDINWVRQAPGQGLEWMGWMNPNSGNSGSVQKFRGRVTMTRDTSIHIAYMELSSLRSEDTAVYYCARGGYTSSWRWYFDLWGRGTLVTVSSASTKGPSVFPLAPSSKSTSGGTAALGCLVKDYFPEPVTVSWNSGALTSGVHTFPAVLQSSGLYSLSSVVTVPSSSLGTQTYICNVNHKPSNTKVDKKVEPKSCDKTHTCPPCPAPELLGGPSVFLFPPKPKDTLMISRTPEVTCVVVDVSHEDPEVKFNWYVDGVEVHNAKTKPCEEQYGSTYRCVSVLTVLHQDWLNGKEYKCKVSNKALPAPIEKTISKAKGQPREPQVYTLPPSREEMTKNQVSLTCLVKGFYPSDIAVEWESNGQPENNYKTTPPVLDSDGSFFLYSKLTVDKSRWQQGNVFSCSVMHEALHNHYTQKSLSLSPGK

SEQ ID NO: 1968 - DNA, 1425 bp, synthetic construct
  misc_feature 1..1425: note = Synthetic
  source 1..1425: mol_type = other DNA
atggacatgagggtgcccgctcagctcctggggctcctgctgctgtggctgagaggtgcgcgctgtcaggtgcagctggtgcagtctggggctgaggtgaagaagcctggggcctcagtgaaggtgtcctgcaaggcttctggatacaccttcaccagatatgatatcaactgggtgcgacaggcccctggacaaggacttgagtggatgggatggatgaaccctaacagtggtaactcaggctctgtacagaagttccggggcagagtcaccatgaccagggacacctccatccacatcgcctacatggaactgagcagcctgagatctgaggacacggccgtgtattactgtgcgagaggcgggtataccagcagctggcggtggtacttcgatctctggggccgtggcaccctggtcactgtctcctcagcctccaccaagggcccatcggtcttccccctggcaccctcctccaagagcacctctgggggcacagcggccctgggctgcctggtcaaggactacttccccgaaccggtgacggtgtcgtggaactcaggcgccctgaccagcggcgtgcacaccttcccggctgtcctacagtcctcaggactctactccctcagcagcgtggtgaccgtgccctccagcagcttgggcacccagacctacatctgcaacgtgaatcacaagcccagcaacaccaaggtggacaagaaagttgagcccaaatcttgtgacaaaactcacacatgcccaccgtgcccagcacctgaactcctggggggaccgtcagtcttcctcttccccccaaaacccaaggacaccctcatgatctcccggacccctgaggtcacatgcgtggtggtggacgtgagccacgaagaccctgaggtcaagttcaactggtacgtggacggcgtggaggtgcataatgccaagacaaagccgtgcgaggagcagtacggcagcacgtaccgttgcgtcagcgtcctcaccgtcctgcaccaggactggctgaatggcaaggagtacaagtgcaaggtgtccaacaaagccctcccagcccccatcgagaaaaccatctccaaagccaaagggcagccccgagaaccacaggtgtacaccctgcccccatcccgggaggagatgaccaagaaccaggtcagcctgacctgcctggtcaaaggcttctatcccagcgacatcgccgtggagtgggagagcaatgggcagccggagaacaactacaagaccacgcctcccgtgctggactccgacggctccttcttcctctatagcaagctcaccgtggacaagagcaggtggcagcaggggaacgtcttctcatgctccgtgatgcatgaggctctgcacaaccactacacgcagaagagcctctccctgtctccgggcaaatag

SEQ ID NO: 1969 - protein, 452 aa, synthetic construct
  REGION 1..452: note = Synthetic
QVQLVQSGAEVKKPGASVKVSCKASGYTFTRYDINWVRQATGQGLEWMGWMNPNSGNAGSVQKFRGRVTMTRDTSIHIAYMELSSLRSEDTAVYYCARGGYTSSWRWYFDLWGRGTLVTVSSASTKGPSVFPLAPSSKSTSGGTAALGCLVKDYFPEPVTVSWNSGALTSGVHTFPAVLQSSGLYSLSSVVTVPSSSLGTQTYICNVNHKPSNTKVDKKVEPKSCDKTHTCPPCPAPELLGGPSVFLFPPKPKDTLMISRTPEVTCVVVDVSHEDPEVKFNWYVDGVEVHNAKTKPCEEQYGSTYRCVSVLTVLHQDWLNGKEYKCKVSNKALPAPIEKTISKAKGQPREPQVYTLPPSREEMTKNQVSLTCLVKGFYPSDIAVEWESNGQPENNYKTTPPVLDSDGSFFLYSKLTVDKSRWQQGNVFSCSVMHEALHNHYTQKSLSLSPGK

SEQ ID NO: 1970 - DNA, 1425 bp, synthetic construct
  misc_feature 1..1425: note = Synthetic
  source 1..1425: mol_type = other DNA
atggacatgagggtgcccgctcagctcctggggctcctgctgctgtggctgagaggtgcgcgctgtcaggtgcagctggtgcagtctggggctgaggtgaagaagcctggggcctcagtgaaggtgtcctgcaaggcttctggatacaccttcaccagatatgatatcaactgggtgcgacaggccactggacaaggacttgagtggatgggatggatgaaccctaacagtggtaacgctggctctgtacagaagttccggggcagagtcaccatgaccagggacacctccatccacatcgcctacatggaactgagcagcctgagatctgaggacacggccgtgtattactgtgcgagaggcgggtataccagcagctggcggtggtacttcgatctctggggccgtggcaccctggtcactgtctcctcagcctccaccaagggcccatcggtcttccccctggcaccctcctccaagagcacctctgggggcacagcggccctgggctgcctggtcaaggactacttccccgaaccggtgacggtgtcgtggaactcaggcgccctgaccagcggcgtgcacaccttcccggctgtcctacagtcctcaggactctactccctcagcagcgtggtgaccgtgccctccagcagcttgggcacccagacctacatctgcaacgtgaatcacaagcccagcaacaccaaggtggacaagaaagttgagcccaaatcttgtgacaaaactcacacatgcccaccgtgcccagcacctgaactcctggggggaccgtcagtcttcctcttccccccaaaacccaaggacaccctcatgatctcccggacccctgaggtcacatgcgtggtggtggacgtgagccacgaagaccctgaggtcaagttcaactggtacgtggacggcgtggaggtgcataatgccaagacaaagccgtgcgaggagcagtacggcagcacgtaccgttgcgtcagcgtcctcaccgtcctgcaccaggactggctgaatggcaaggagtacaagtgcaaggtgtccaacaaagccctcccagcccccatcgagaaaaccatctccaaagccaaagggcagccccgagaaccacaggtgtacaccctgcccccatcccgggaggagatgaccaagaaccaggtcagcctgacctgcctggtcaaaggcttctatcccagcgacatcgccgtggagtgggagagcaatgggcagccggagaacaactacaagaccacgcctcccgtgctggactccgacggctccttcttcctctatagcaagctcaccgtggacaagagcaggtggcagcaggggaacgtcttctcatgctccgtgatgcatgaggctctgcacaaccactacacgcagaagagcctctccctgtctccgggcaaatag

SEQ ID NO: 1971 - protein, 452 aa, synthetic construct
  REGION 1..452: note = Synthetic
QVQLVQSGAEVKKPGASVKVSCKASGYTFTRYDINWVRQATGQGLEWMGWMNPNAGNAGSVQKFRGRVTMTRDTSIHIAYMELSSLRSEDTAVYYCARGGYTSSWRWYFDLWGRGTLVTVSSASTKGPSVFPLAPSSKSTSGGTAALGCLVKDYFPEPVTVSWNSGALTSGVHTFPAVLQSSGLYSLSSVVTVPSSSLGTQTYICNVNHKPSNTKVDKKVEPKSCDKTHTCPPCPAPELLGGPSVFLFPPKPKDTLMISRTPEVTCVVVDVSHEDPEVKFNWYVDGVEVHNAKTKPCEEQYGSTYRCVSVLTVLHQDWLNGKEYKCKVSNKALPAPIEKTISKAKGQPREPQVYTLPPSREEMTKNQVSLTCLVKGFYPSDIAVEWESNGQPENNYKTTPPVLDSDGSFFLYSKLTVDKSRWQQGNVFSCSVMHEALHNHYTQKSLSLSPGK

SEQ ID NO: 1972 - DNA, 1425 bp, synthetic construct
  misc_feature 1..1425: note = Synthetic
  source 1..1425: mol_type = other DNA
atggacatgagggtgcccgctcagctcctggggctcctgctgctgtggctgagaggtgcgcgctgtcaggtgcagctggtgcagtctggggctgaggtgaagaagcctggggcctcagtgaaggtgtcctgcaaggcttctggatacaccttcaccagatatgatatcaactgggtgcgacaggccactggacaaggacttgagtggatgggatggatgaaccctaacgctggtaacgctggctctgtacagaagttccggggcagagtcaccatgaccagggacacctccatccacatcgcctacatggaactgagcagcctgagatctgaggacacggccgtgtattactgtgcgagaggcgggtataccagcagctggcggtggtacttcgatctctggggccgtggcaccctggtcactgtctcctcagcctccaccaagggcccatcggtcttccccctggcaccctcctccaagagcacctctgggggcacagcggccctgggctgcctggtcaaggactacttccccgaaccggtgacggtgtcgtggaactcaggcgccctgaccagcggcgtgcacaccttcccggctgtcctacagtcctcaggactctactccctcagcagcgtggtgaccgtgccctccagcagcttgggcacccagacctacatctgcaacgtgaatcacaagcccagcaacaccaaggtggacaagaaagttgagcccaaatcttgtgacaaaactcacacatgcccaccgtgcccagcacctgaactcctggggggaccgtcagtcttcctcttccccccaaaacccaaggacaccctcatgatctcccggacccctgaggtcacatgcgtggtggtggacgtgagccacgaagaccctgaggtcaagttcaactggtacgtggacggcgtggaggtgcataatgccaagacaaagccgtgcgaggagcagtacggcagcacgtaccgttgcgtcagcgtcctcaccgtcctgcaccaggactggctgaatggcaaggagtacaagtgcaaggtgtccaacaaagccctcccagcccccatcgagaaaaccatctccaaagccaaagggcagccccgagaaccacaggtgtacaccctgcccccatcccgggaggagatgaccaagaaccaggtcagcctgacctgcctggtcaaaggcttctatcccagcgacatcgccgtggagtgggagagcaatgggcagccggagaacaactacaagaccacgcctcccgtgctggactccgacggctccttcttcctctatagcaagctcaccgtggacaagagcaggtggcagcaggggaacgtcttctcatgctccgtgatgcatgaggctctgcacaaccactacacgcagaagagcctctccctgtctccgggcaaatag

SEQ ID NO: 1973 - protein, 452 aa, synthetic construct
  REGION 1..452: note = Synthetic
QVQLVQSGAEVKKPGASVKVSCKASGYTFTRYDINWVRQATGQGLEWMGWMNPNAGNSGSVQKFRGRVTMTRDTSIHIAYMELSSLRSEDTAVYYCARGGYTSSWRWYFDLWGRGTLVTVSSASTKGPSVFPLAPSSKSTSGGTAALGCLVKDYFPEPVTVSWNSGALTSGVHTFPAVLQSSGLYSLSSVVTVPSSSLGTQTYICNVNHKPSNTKVDKKVEPKSCDKTHTCPPCPAPELLGGPSVFLFPPKPKDTLMISRTPEVTCVVVDVSHEDPEVKFNWYVDGVEVHNAKTKPCEEQYGSTYRCVSVLTVLHQDWLNGKEYKCKVSNKALPAPIEKTISKAKGQPREPQVYTLPPSREEMTKNQVSLTCLVKGFYPSDIAVEWESNGQPENNYKTTPPVLDSDGSFFLYSKLTVDKSRWQQGNVFSCSVMHEALHNHYTQKSLSLSPGK

SEQ ID NO: 1974 - DNA, 1425 bp, synthetic construct
  misc_feature 1..1425: note = Synthetic
  source 1..1425: mol_type = other DNA
atggacatgagggtgcccgctcagctcctggggctcctgctgctgtggctgagaggtgcgcgctgtcaggtgcagctggtgcagtctggggctgaggtgaagaagcctggggcctcagtgaaggtgtcctgcaaggcttctggatacaccttcaccagatatgatatcaactgggtgcgacaggccactggacaaggacttgagtggatgggatggatgaaccctaacgctggtaactcaggctctgtacagaagttccggggcagagtcaccatgaccagggacacctccatccacatcgcctacatggaactgagcagcctgagatctgaggacacggccgtgtattactgtgcgagaggcgggtataccagcagctggcggtggtacttcgatctctggggccgtggcaccctggtcactgtctcctcagcctccaccaagggcccatcggtcttccccctggcaccctcctccaagagcacctctgggggcacagcggccctgggctgcctggtcaaggactacttccccgaaccggtgacggtgtcgtggaactcaggcgccctgaccagcggcgtgcacaccttcccggctgtcctacagtcctcaggactctactccctcagcagcgtggtgaccgtgccctccagcagcttgggcacccagacctacatctgcaacgtgaatcacaagcccagcaacaccaaggtggacaagaaagttgagcccaaatcttgtgacaaaactcacacatgcccaccgtgcccagcacctgaactcctggggggaccgtcagtcttcctcttccccccaaaacccaaggacaccctcatgatctcccggacccctgaggtcacatgcgtggtggtggacgtgagccacgaagaccctgaggtcaagttcaactggtacgtggacggcgtggaggtgcataatgccaagacaaagccgtgcgaggagcagtacggcagcacgtaccgttgcgtcagcgtcctcaccgtcctgcaccaggactggctgaatggcaaggagtacaagtgcaaggtgtccaacaaagccctcccagcccccatcgagaaaaccatctccaaagccaaagggcagccccgagaaccacaggtgtacaccctgcccccatcccgggaggagatgaccaagaaccaggtcagcctgacctgcctggtcaaaggcttctatcccagcgacatcgccgtggagtgggagagcaatgggcagccggagaacaactacaagaccacgcctcccgtgctggactccgacggctccttcttcctctatagcaagctcaccgtggacaagagcaggtggcagcaggggaacgtcttctcatgctccgtgatgcatgaggctctgcacaaccactacacgcagaagagcctctccctgtctccgggcaaatag

SEQ ID NO: 1975 - protein, 452 aa, synthetic construct
  REGION 1..452: note = Synthetic
QVQLVQSGAEVKKPGASVKVSCKASGYTFTRYDINWVRQATGQGLEWMGWMNPNSGNSGSVQKFRGRVTMTRDTSIHIAYMELSSLRSEDTAVYYCARGGYTSSWRYYFDLWGRGTLVTVSSASTKGPSVFPLAPSSKSTSGGTAALGCLVKDYFPEPVTVSWNSGALTSGVHTFPAVLQSSGLYSLSSVVTVPSSSLGTQTYICNVNHKPSNTKVDKKVEPKSCDKTHTCPPCPAPELLGGPSVFLFPPKPKDTLMISRTPEVTCVVVDVSHEDPEVKFNWYVDGVEVHNAKTKPCEEQYGSTYRCVSVLTVLHQDWLNGKEYKCKVSNKALPAPIEKTISKAKGQPREPQVYTLPPSREEMTKNQVSLTCLVKGFYPSDIAVEWESNGQPENNYKTTPPVLDSDGSFFLYSKLTVDKSRWQQGNVFSCSVMHEALHNHYTQKSLSLSPGK

SEQ ID NO: 1976 - DNA, 1425 bp, synthetic construct
  misc_feature 1..1425: note = Synthetic
  source 1..1425: mol_type = other DNA
atggacatgagggtgcccgctcagctcctggggctcctgctgctgtggctgagaggtgcgcgctgtcaggtgcagctggtgcagtctggggctgaggtgaagaagcctggggcctcagtgaaggtgtcctgcaaggcttctggatacaccttcaccagatatgatatcaactgggtgcgacaggccactggacaaggacttgagtggatgggatggatgaaccctaacagtggtaactcaggctctgtacagaagttccggggcagagtcaccatgaccagggacacctccatccacatcgcctacatggaactgagcagcctgagatctgaggacacggccgtgtattactgtgcgagaggcgggtataccagcagctggcggtattacttcgatctctggggccgtggcaccctggtcactgtctcctcagcctccaccaagggcccatcggtcttccccctggcaccctcctccaagagcacctctgggggcacagcggccctgggctgcctggtcaaggactacttccccgaaccggtgacggtgtcgtggaactcaggcgccctgaccagcggcgtgcacaccttcccggctgtcctacagtcctcaggactctactccctcagcagcgtggtgaccgtgccctccagcagcttgggcacccagacctacatctgcaacgtgaatcacaagcccagcaacaccaaggtggacaagaaagttgagcccaaatcttgtgacaaaactcacacatgcccaccgtgcccagcacctgaactcctggggggaccgtcagtcttcctcttccccccaaaacccaaggacaccctcatgatctcccggacccctgaggtcacatgcgtggtggtggacgtgagccacgaagaccctgaggtcaagttcaactggtacgtggacggcgtggaggtgcataatgccaagacaaagccgtgcgaggagcagtacggcagcacgtaccgttgcgtcagcgtcctcaccgtcctgcaccaggactggctgaatggcaaggagtacaagtgcaaggtgtccaacaaagccctcccagcccccatcgagaaaaccatctccaaagccaaagggcagccccgagaaccacaggtgtacaccctgcccccatcccgggaggagatgaccaagaaccaggtcagcctgacctgcctggtcaaaggcttctatcccagcgacatcgccgtggagtgggagagcaatgggcagccggagaacaactacaagaccacgcctcccgtgctggactccgacggctccttcttcctctatagcaagctcaccgtggacaagagcaggtggcagcaggggaacgtcttctcatgctccgtgatgcatgaggctctgcacaaccactacacgcagaagagcctctccctgtctccgggcaaatag

SEQ ID NO: 1977 - protein, 452 aa, synthetic construct
  REGION 1..452: note = Synthetic
QVQLVQSGAEVKKPGASVKVSCKASGYTFTRYDINWVRQATGQGLEWMGWMNPNSGNSGSVQKFRGRVTMTRDTSIHIAYMELSSLRSEDTAVYYCARGGYTSSWRHYFDLWGRGTLVTVSSASTKGPSVFPLAPSSKSTSGGTAALGCLVKDYFPEPVTVSWNSGALTSGVHTFPAVLQSSGLYSLSSVVTVPSSSLGTQTYICNVNHKPSNTKVDKKVEPKSCDKTHTCPPCPAPELLGGPSVFLFPPKPKDTLMISRTPEVTCVVVDVSHEDPEVKFNWYVDGVEVHNAKTKPCEEQYGSTYRCVSVLTVLHQDWLNGKEYKCKVSNKALPAPIEKTISKAKGQPREPQVYTLPPSREEMTKNQVSLTCLVKGFYPSDIAVEWESNGQPENNYKTTPPVLDSDGSFFLYSKLTVDKSRWQQGNVFSCSVMHEALHNHYTQKSLSLSPGK

SEQ ID NO: 1978 - DNA, 1425 bp, synthetic construct
  misc_feature 1..1425: note = Synthetic
  source 1..1425: mol_type = other DNA
atggacatgagggtgcccgctcagctcctggggctcctgctgctgtggctgagaggtgcgcgctgtcaggtgcagctggtgcagtctggggctgaggtgaagaagcctggggcctcagtgaaggtgtcctgcaaggcttctggatacaccttcaccagatatgatatcaactgggtgcgacaggccactggacaaggacttgagtggatgggatggatgaaccctaacagtggtaactcaggctctgtacagaagttccggggcagagtcaccatgaccagggacacctccatccacatcgcctacatggaactgagcagcctgagatctgaggacacggccgtgtattactgtgcgagaggcgggtataccagcagctggcggcattacttcgatctctggggccgtggcaccctggtcactgtctcctcagcctccaccaagggcccatcggtcttccccctggcaccctcctccaagagcacctctgggggcacagcggccctgggctgcctggtcaaggactacttccccgaaccggtgacggtgtcgtggaactcaggcgccctgaccagcggcgtgcacaccttcccggctgtcctacagtcctcaggactctactccctcagcagcgtggtgaccgtgccctccagcagcttgggcacccagacctacatctgcaacgtgaatcacaagcccagcaacaccaaggtggacaagaaagttgagcccaaatcttgtgacaaaactcacacatgcccaccgtgcccagcacctgaactcctggggggaccgtcagtcttcctcttccccccaaaacccaaggacaccctcatgatctcccggacccctgaggtcacatgcgtggtggtggacgtgagccacgaagaccctgaggtcaagttcaactggtacgtggacggcgtggaggtgcataatgccaagacaaagccgtgcgaggagcagtacggcagcacgtaccgttgcgtcagcgtcctcaccgtcctgcaccaggactggctgaatggcaaggagtacaagtgcaaggtgtccaacaaagccctcccagcccccatcgagaaaaccatctccaaagccaaagggcagccccgagaaccacaggtgtacaccctgcccccatcccgggaggagatgaccaagaaccaggtcagcctgacctgcctggtcaaaggcttctatcccagcgacatcgccgtggagtgggagagcaatgggcagccggagaacaactacaagaccacgcctcccgtgctggactccgacggctccttcttcctctatagcaagctcaccgtggacaagagcaggtggcagcaggggaacgtcttctcatgctccgtgatgcatgaggctctgcacaaccactacacgcagaagagcctctccctgtctccgggcaaatag

SEQ ID NO: 1979 - protein, 452 aa, synthetic construct
  REGION 1..452: note = Synthetic
QVQLVQSGAEVKKPGASVKVSCKASGYTFTRYDINWVRQATGQGLEWMGWMNPNSGNSGSVQKFRGRVTMTRDTSIHIAYMELSSLRSEDTAVYYCARGGYTSSWRFYFDLWGRGTLVTVSSASTKGPSVFPLAPSSKSTSGGTAALGCLVKDYFPEPVTVSWNSGALTSGVHTFPAVLQSSGLYSLSSVVTVPSSSLGTQTYICNVNHKPSNTKVDKKVEPKSCDKTHTCPPCPAPELLGGPSVFLFPPKPKDTLMISRTPEVTCVVVDVSHEDPEVKFNWYVDGVEVHNAKTKPCEEQYGSTYRCVSVLTVLHQDWLNGKEYKCKVSNKALPAPIEKTISKAKGQPREPQVYTLPPSREEMTKNQVSLTCLVKGFYPSDIAVEWESNGQPENNYKTTPPVLDSDGSFFLYSKLTVDKSRWQQGNVFSCSVMHEALHNHYTQKSLSLSPGK

SEQ ID NO: 1980 - DNA, 1425 bp, synthetic construct
  misc_feature 1..1425: note = Synthetic
  source 1..1425: mol_type = other DNA
atggacatgagggtgcccgctcagctcctggggctcctgctgctgtggctgagaggtgcgcgctgtcaggtgcagctggtgcagtctggggctgaggtgaagaagcctggggcctcagtgaaggtgtcctgcaaggcttctggatacaccttcaccagatatgatatcaactgggtgcgacaggccactggacaaggacttgagtggatgggatggatgaaccctaacagtggtaactcaggctctgtacagaagttccggggcagagtcaccatgaccagggacacctccatccacatcgcctacatggaactgagcagcctgagatctgaggacacggccgtgtattactgtgcgagaggcgggtataccagcagctggcggttttacttcgatctctggggccgtggcaccctggtcactgtctcctcagcctccaccaagggcccatcggtcttccccctggcaccctcctccaagagcacctctgggggcacagcggccctgggctgcctggtcaaggactacttccccgaaccggtgacggtgtcgtggaactcaggcgccctgaccagcggcgtgcacaccttcccggctgtcctacagtcctcaggactctactccctcagcagcgtggtgaccgtgccctccagcagcttgggcacccagacctacatctgcaacgtgaatcacaagcccagcaacaccaaggtggacaagaaagttgagcccaaatcttgtgacaaaactcacacatgcccaccgtgcccagcacctgaactcctggggggaccgtcagtcttcctcttccccccaaaacccaaggacaccctcatgatctcccggacccctgaggtcacatgcgtggtggtggacgtgagccacgaagaccctgaggtcaagttcaactggtacgtggacggcgtggaggtgcataatgccaagacaaagccgtgcgaggagcagtacggcagcacgtaccgttgcgtcagcgtcctcaccgtcctgcaccaggactggctgaatggcaaggagtacaagtgcaaggtgtccaacaaagccctcccagcccccatcgagaaaaccatctccaaagccaaagggcagccccgagaaccacaggtgtacaccctgcccccatcccgggaggagatgaccaagaaccaggtcagcctgacctgcctggtcaaaggcttctatcccagcgacatcgccgtggagtgggagagcaatgggcagccggagaacaactacaagaccacgcctcccgtgctggactccgacggctccttcttcctctatagcaagctcaccgtggacaagagcaggtggcagcaggggaacgtcttctcatgctccgtgatgcatgaggctctgcacaaccactacacgcagaagagcctctccctgtctccgggcaaatag

SEQ ID NO: 1981 - protein, 452 aa, synthetic construct; identical to SEQ ID NO: 1885
  REGION 1..452: note = Synthetic

SEQ ID NO: 1982 - DNA, 1425 bp, synthetic construct; identical to SEQ ID NO: 1886
  misc_feature 1..1425: note = Synthetic
  source 1..1425: mol_type = other DNA

SEQ ID NO: 1983 - protein, 452 aa, synthetic construct
  REGION 1..452: note = Synthetic
QVQLVQSGAEVKKPGASVKVSCKASGYTFTRYDINWVRQATGQGLEWMGWMNPNSGQSGSVQKFRGRVTMTRDTSIHIAYMELSSLRSEDTAVYYCARGGYTSSWRWYFDLWGRGTLVTVSSASTKGPSVFPLAPSSKSTSGGTAALGCLVKDYFPEPVTVSWNSGALTSGVHTFPAVLQSSGLYSLSSVVTVPSSSLGTQTYICNVNHKPSNTKVDKKVEPKSCDKTHTCPPCPAPELLGGPSVFLFPPKPKDTLMISRTPEVTCVVVDVSHEDPEVKFNWYVDGVEVHNAKTKPCEEQYGSTYRCVSVLTVLHQDWLNGKEYKCKVSNKALPAPIEKTISKAKGQPREPQVYTLPPSREEMTKNQVSLTCLVKGFYPSDIAVEWESNGQPENNYKTTPPVLDSDGSFFLYSKLTVDKSRWQQGNVFSCSVMHEALHNHYTQKSLSLSPGK

SEQ ID NO: 1984 - DNA, 1425 bp, synthetic construct
  misc_feature 1..1425: note = Synthetic
  source 1..1425: mol_type = other DNA
atggacatgagggtgcccgctcagctcctggggctcctgctgctgtggctgagaggtgcgcgctgtcaggtgcagctggtgcagtctggggctgaggtgaagaagcctggggcctcagtgaaggtgtcctgcaaggcttctggatacaccttcaccagatatgatatcaactgggtgcgacaggccactggacaaggacttgagtggatgggatggatgaaccctaacagtggtcaatcaggctctgtacagaagttccggggcagagtcaccatgaccagggacacctccatccacatcgcctacatggaactgagcagcctgagatctgaggacacggccgtgtattactgtgcgagaggcgggtataccagcagctggcggtggtacttcgatctctggggccgtggcaccctggtcactgtctcctcagcctccaccaagggcccatcggtcttccccctggcaccctcctccaagagcacctctgggggcacagcggccctgggctgcctggtcaaggactacttccccgaaccggtgacggtgtcgtggaactcaggcgccctgaccagcggcgtgcacaccttcccggctgtcctacagtcctcaggactctactccctcagcagcgtggtgaccgtgccctccagcagcttgggcacccagacctacatctgcaacgtgaatcacaagcccagcaacaccaaggtggacaagaaagttgagcccaaatcttgtgacaaaactcacacatgcccaccgtgcccagcacctgaactcctggggggaccgtcagtcttcctcttccccccaaaacccaaggacaccctcatgatctcccggacccctgaggtcacatgcgtggtggtggacgtgagccacgaagaccctgaggtcaagttcaactggtacgtggacggcgtggaggtgcataatgccaagacaaagccgtgcgaggagcagtacggcagcacgtaccgttgcgtcagcgtcctcaccgtcctgcaccaggactggctgaatggcaaggagtacaagtgcaaggtgtccaacaaagccctcccagcccccatcgagaaaaccatctccaaagccaaagggcagccccgagaaccacaggtgtacaccctgcccccatcccgggaggagatgaccaagaaccaggtcagcctgacctgcctggtcaaaggcttctatcccagcgacatcgccgtggagtgggagagcaatgggcagccggagaacaactacaagaccacgcctcccgtgctggactccgacggctccttcttcctctatagcaagctcaccgtggacaagagcaggtggcagcaggggaacgtcttctcatgctccgtgatgcatgaggctctgcacaaccactacacgcagaagagcctctccctgtctccgggcaaatag

SEQ ID NO: 1985 - protein, 452 aa, synthetic construct
  REGION 1..452: note = Synthetic
QVQLVQSGAEVKKPGASVKVSCKASGYTFTRYDINWVRQATGQGLEWMGWMNPQSGNSGSVQKFRGRVTMTRDTSIHIAYMELSSLRSEDTAVYYCARGGYTSSWRWYFDLWGRGTLVTVSSASTKGPSVFPLAPSSKSTSGGTAALGCLVKDYFPEPVTVSWNSGALTSGVHTFPAVLQSSGLYSLSSVVTVPSSSLGTQTYICNVNHKPSNTKVDKKVEPKSCDKTHTCPPCPAPELLGGPSVFLFPPKPKDTLMISRTPEVTCVVVDVSHEDPEVKFNWYVDGVEVHNAKTKPCEEQYGSTYRCVSVLTVLHQDWLNGKEYKCKVSNKALPAPIEKTISKAKGQPREPQVYTLPPSREEMTKNQVSLTCLVKGFYPSDIAVEWESNGQPENNYKTTPPVLDSDGSFFLYSKLTVDKSRWQQGNVFSCSVMHEALHNHYTQKSLSLSPGK

SEQ ID NO: 1986 - DNA, 1425 bp, synthetic construct
  misc_feature 1..1425: note = Synthetic
  source 1..1425: mol_type = other DNA
atggacatgagggtgcccgctcagctcctggggctcctgctgctgtggctgagaggtgcgcgctgtcaggtgcagctggtgcagtctggggctgaggtgaagaagcctggggcctcagtgaaggtgtcctgcaaggcttctggatacaccttcaccagatatgatatcaactgggtgcgacaggccactggacaaggacttgagtggatgggatggatgaaccctcaaagtggtaactcaggctctgtacagaagttccggggcagagtcaccatgaccagggacacctccatccacatcgcctacatggaactgagcagcctgagatctgaggacacggccgtgtattactgtgcgagaggcgggtataccagcagctggcggtggtacttcgatctctggggccgtggcaccctggtcactgtctcctcagcctccaccaagggcccatcggtcttccccctggcaccctcctccaagagcacctctgggggcacagcggccctgggctgcctggtcaaggactacttccccgaaccggtgacggtgtcgtggaactcaggcgccctgaccagcggcgtgcacaccttcccggctgtcctacagtcctcaggactctactccctcagcagcgtggtgaccgtgccctccagcagcttgggcacccagacctacatctgcaacgtgaatcacaagcccagcaacaccaaggtggacaagaaagttgagcccaaatcttgtgacaaaactcacacatgcccaccgtgcccagcacctgaactcctggggggaccgtcagtcttcctcttccccccaaaacccaaggacaccctcatgatctcccggacccctgaggtcacatgcgtggtggtggacgtgagccacgaagaccctgaggtcaagttcaactggtacgtggacggcgtggaggtgcataatgccaagacaaagccgtgcgaggagcagtacggcagcacgtaccgttgcgtcagcgtcctcaccgtcctgcaccaggactggctgaatggcaaggagtacaagtgcaaggtgtccaacaaagccctcccagcccccatcgagaaaaccatctccaaagccaaagggcagccccgagaaccacaggtgtacaccctgcccccatcccgggaggagatgaccaagaaccaggtcagcctgacctgcctggtcaaaggcttctatcccagcgacatcgccgtggagtgggagagcaatgggcagccggagaacaactacaagaccacgcctcccgtgctggactccgacggctccttcttcctctatagcaagctcaccgtggacaagagcaggtggcagcaggggaacgtcttctcatgctccgtgatgcatgaggctctgcacaaccactacacgcagaagagcctctccctgtctccgggcaaatag

SEQ ID NO: 1987 - protein, 452 aa, synthetic construct
  REGION 1..452: note = Synthetic
QVQLVQSGAEVKKPGASVKVSCKASGYTFTRYDINWVRQATGQGLEWMGWMNPQSGQSGSVQKFRGRVTMTRDTSIHIAYMELSSLRSEDTAVYYCARGGYTSSWRWYFDLWGRGTLVTVSSASTKGPSVFPLAPSSKSTSGGTAALGCLVKDYFPEPVTVSWNSGALTSGVHTFPAVLQSSGLYSLSSVVTVPSSSLGTQTYICNVNHKPSNTKVDKKVEPKSCDKTHTCPPCPAPELLGGPSVFLFPPKPKDTLMISRTPEVTCVVVDVSHEDPEVKFNWYVDGVEVHNAKTKPCEEQYGSTYRCVSVLTVLHQDWLNGKEYKCKVSNKALPAPIEKTISKAKGQPREPQVYTLPPSREEMTKNQVSLTCLVKGFYPSDIAVEWESNGQPENNYKTTPPVLDSDGSFFLYSKLTVDKSRWQQGNVFSCSVMHEALHNHYTQKSLSLSPGK

SEQ ID NO: 1988 - DNA, 1425 bp, synthetic construct
  misc_feature 1..1425: note = Synthetic
  source 1..1425: mol_type = other DNA
atggacatgagggtgcccgctcagctcctggggctcctgctgctgtggctgagaggtgcgcgctgtcaggtgcagctggtgcagtctggggctgaggtgaagaagcctggggcctcagtgaaggtgtcctgcaaggcttctggatacaccttcaccagatatgatatcaactgggtgcgacaggccactggacaaggacttgagtggatgggatggatgaaccctcaaagtggtcaatcaggctctgtacagaagttccggggcagagtcaccatgaccagggacacctccatccacatcgcctacatggaactgagcagcctgagatctgaggacacggccgtgtattactgtgcgagaggcgggtataccagcagctggcggtggtacttcgatctctggggccgtggcaccctggtcactgtctcctcagcctccaccaagggcccatcggtcttccccctggcaccctcctccaagagcacctctgggggcacagcggccctgggctgcctggtcaaggactacttccccgaaccggtgacggtgtcgtggaactcaggcgccctgaccagcggcgtgcacaccttcccggctgtcctacagtcctcaggactctactccctcagcagcgtggtgaccgtgccctccagcagcttgggcacccagacctacatctgcaacgtgaatcacaagcccagcaacaccaaggtggacaagaaagttgagcccaaatcttgtgacaaaactcacacatgcccaccgtgcccagcacctgaactcctggggggaccgtcagtcttcctcttccccccaaaacccaaggacaccctcatgatctcccggacccctgaggtcacatgcgtggtggtggacgtgagccacgaagaccctgaggtcaagttcaactggtacgtggacggcgtggaggtgcataatgccaagacaaagccgtgcgaggagcagtacggcagcacgtaccgttgcgtcagcgtcctcaccgtcctgcaccaggactggctgaatggcaaggagtacaagtgcaaggtgtccaacaaagccctcccagcccccatcgagaaaaccatctccaaagccaaagggcagccccgagaaccacaggtgtacaccctgcccccatcccgggaggagatgaccaagaaccaggtcagcctgacctgcctggtcaaaggcttctatcccagcgacatcgccgtggagtgggagagcaatgggcagccggagaacaactacaagaccacgcctcccgtgctggactccgacggctccttcttcctctatagcaagctcaccgtggacaagagcaggtggcagcaggggaacgtcttctcatgctccgtgatgcatgaggctctgcacaaccactacacgcagaagagcctctccctgtctccgggcaaatag

SEQ ID NO: 1989 - protein, 451 aa, synthetic construct
  REGION 1..451: note = Synthetic
QVQLVQSGAEVKKPGASVKVSCKASGYTFNGYYIHWVRQAPGQGLEWMGWLNPNSGGANYAQKFQGRVTMTRDTSISTAYMELSRLRSDDTAVYYCARDQRKTTVTPFEYWGQGTLVTVSSASTKGPSVFPLAPSSKSTSGGTAALGCLVKDYFPEPVTVSWNSGALTSGVHTFPAVLQSSGLYSLSSVVTVPSSSLGTQTYICNVNHKPSNTKVDKKVEPKSCDKTHTCPPCPAPELLGGPSVFLFPPKPKDTLMISRTPEVTCVVVDVSHEDPEVKFNWYVDGVEVHNAKTKPCEEQYGSTYRCVSVLTVLHQDWLNGKEYKCKVSNKALPAPIEKTISKAKGQPREPQVYTLPPSREEMTKNQVSLTCLVKGFYPSDIAVEWESNGQPENNYKTTPPVLDSDGSFFLYSKLTVDKSRWQQGNVFSCSVMHEALHNHYTQKSLSLSPGK

SEQ ID NO: 1990 - DNA, 1422 bp, synthetic construct
  misc_feature 1..1422: note = Synthetic
  source 1..1422: mol_type = other DNA
atggacatgagggtgcccgctcagctcctggggctcctgctgctgtggctgagaggtgcgcgctgtcaggtgcagctggtgcagtctggggctgaggtgaagaagcctggggcctcagtgaaggtgtcctgcaaggcttctggatacaccttcaacggctactatatccactgggtgcgacaggcccctggacaagggcttgagtggatgggatggctcaacccaaacagtggtggcgcaaactatgcacagaagtttcagggccgtgtcaccatgaccagggacacgtccatcagcacagcctacatggagctgagcaggctgcgttctgacgacacggccgtgtattactgtgcgagagatcagaggaagaccacggtgactccctttgagtactggggccagggaaccctggtcaccgtgtcctcagcctccaccaagggcccatcggtcttccccctggcaccctcctccaagagcacctctgggggcacagcggccctgggctgcctggtcaaggactacttccccgaaccggtgacggtgtcgtggaactcaggcgccctgaccagcggcgtgcacaccttcccggctgtcctacagtcctcaggactctactccctcagcagcgtggtgaccgtgccctccagcagcttgggcacccagacctacatctgcaacgtgaatcacaagcccagcaacaccaaggtggacaagaaagttgagcccaaatcttgtgacaaaactcacacatgcccaccgtgcccagcacctgaactcctggggggaccgtcagtcttcctcttccccccaaaacccaaggacaccctcatgatctcccggacccctgaggtcacatgcgtggtggtggacgtgagccacgaagaccctgaggtcaagttcaactggtacgtggacggcgtggaggtgcataatgccaagacaaagccgtgcgaggagcagtacggcagcacgtaccgttgcgtcagcgtcctcaccgtcctgcaccaggactggctgaatggcaaggagtacaagtgcaaggtgtccaacaaagccctcccagcccccatcgagaaaaccatctccaaagccaaagggcagccccgagaaccacaggtgtacaccctgcccccatcccgggaggagatgaccaagaaccaggtcagcctgacctgcctggtcaaaggcttctatcccagcgacatcgccgtggagtgggagagcaatgggcagccggagaacaactacaagaccacgcctcccgtgctggactccgacggctccttcttcctctatagcaagctcaccgtggacaagagcaggtggcagcaggggaacgtcttctcatgctccgtgatgcatgaggctctgcacaaccactacacgcagaagagcctctccctgtctccgggcaaatag

SEQ ID NO: 1991 - protein, 451 aa, synthetic construct; identical to SEQ ID NO: 1989
  REGION 1..451: note = Synthetic

SEQ ID NO: 1992 - DNA, 1422 bp, synthetic construct; identical to SEQ ID NO: 1990
  misc_feature 1..1422: note = Synthetic
  source 1..1422: mol_type = other DNA

SEQ ID NO: 1993 - protein, 451 aa, synthetic construct; identical to SEQ ID NO: 1989
  REGION 1..451: note = Synthetic

SEQ ID NO: 1994 - DNA, 1422 bp, synthetic construct; identical to SEQ ID NO: 1990
  misc_feature 1..1422: note = Synthetic
  source 1..1422: mol_type = other DNA

SEQ ID NO: 1995 - protein, 451 aa, synthetic construct; identical to SEQ ID NO: 1989
  REGION 1..451: note = Synthetic

SEQ ID NO: 1996 - DNA, 1422 bp, synthetic construct; identical to SEQ ID NO: 1990
  misc_feature 1..1422: note = Synthetic
  source 1..1422: mol_type = other DNA

SEQ ID NO: 1997 - protein, 451 aa, synthetic construct
  REGION 1..451: note = Synthetic
QVQLVQSGAEVKKPGASVKVSCKASGYTFNGYYIHWVRQAPGQGLEWMGWLNPNSGGANYAQKFQGRVTMTRDTSISTAYMELSRLTSDDTAVYYCARDQRKTTVTPFEYWGQGTLVTVSSASTKGPSVFPLAPSSKSTSGGTAALGCLVKDYFPEPVTVSWNSGALTSGVHTFPAVLQSSGLYSLSSVVTVPSSSLGTQTYICNVNHKPSNTKVDKKVEPKSCDKTHTCPPCPAPELLGGPSVFLFPPKPKDTLMISRTPEVTCVVVDVSHEDPEVKFNWYVDGVEVHNAKTKPCEEQYGSTYRCVSVLTVLHQDWLNGKEYKCKVSNKALPAPIEKTISKAKGQPREPQVYTLPPSREEMTKNQVSLTCLVKGFYPSDIAVEWESNGQPENNYKTTPPVLDSDGSFFLYSKLTVDKSRWQQGNVFSCSVMHEALHNHYTQKSLSLSPGK

SEQ ID NO: 1998 - DNA, 1422 bp, synthetic construct
  misc_feature 1..1422: note = Synthetic
  source 1..1422: mol_type = other DNA
atggacatgagggtgcccgctcagctcctggggctcctgctgctgtggctgagaggtgcgcgctgtcaggtgcagctggtgcagtctggggctgaggtgaagaagcctggggcctcagtgaaggtgtcctgcaaggcttctggatacaccttcaacggctactatatccactgggtgcgacaggcccctggacaagggcttgagtggatgggatggctcaacccaaacagtggtggcgcaaactatgcacagaagtttcagggccgtgtcaccatgaccagggacacgtccatcagcacagcctacatggagctgagcaggctgacatctgacgacacggccgtgtattactgtgcgagagatcagaggaagaccacggtgactccctttgagtactggggccagggaaccctggtcaccgtgtcctcagcctccaccaagggcccatcggtcttccccctggcaccctcctccaagagcacctctgggggcacagcggccctgggctgcctggtcaaggactacttccccgaaccggtgacggtgtcgtggaactcaggcgccctgaccagcggcgtgcacaccttcccggctgtcctacagtcctcaggactctactccctcagcagcgtggtgaccgtgccctccagcagcttgggcacccagacctacatctgcaacgtgaatcacaagcccagcaacaccaaggtggacaagaaagttgagcccaaatcttgtgacaaaactcacacatgcccaccgtgcccagcacctgaactcctggggggaccgtcagtcttcctcttccccccaaaacccaaggacaccctcatgatctcccggacccctgaggtcacatgcgtggtggtggacgtgagccacgaagaccctgaggtcaagttcaactggtacgtggacggcgtggaggtgcataatgccaagacaaagccgtgcgaggagcagtacggcagcacgtaccgttgcgtcagcgtcctcaccgtcctgcaccaggactggctgaatggcaaggagtacaagtgcaaggtgtccaacaaagccctcccagcccccatcgagaaaaccatctccaaagccaaagggcagccccgagaaccacaggtgtacaccctgcccccatcccgggaggagatgaccaagaaccaggtcagcctgacctgcctggtcaaaggcttctatcccagcgacatcgccgtggagtgggagagcaatgggcagccggagaacaactacaagaccacgcctcccgtgctggactccgacggctccttcttcctctatagcaagctcaccgtggacaagagcaggtggcagcaggggaacgtcttctcatgctccgtgatgcatgaggctctgcacaaccactacacgcagaagagcctctccctgtctccgggcaaatag

SEQ ID NO: 1999 - protein, 449 aa, synthetic construct; identical to SEQ ID NO: 1889
  REGION 1..449: note = Synthetic

SEQ ID NO: 2000 - DNA, 1416 bp, synthetic construct; identical to SEQ ID NO: 1890
  misc_feature 1..1416: note = Synthetic
  source 1..1416: mol_type = other DNA

SEQ ID NO: 2001 - protein, 449 aa, synthetic construct; identical to SEQ ID NO: 1889
  REGION 1..449: note = Synthetic

SEQ ID NO: 2002 - DNA, 1416 bp, synthetic construct; identical to SEQ ID NO: 1890
  misc_feature 1..1416: note = Synthetic
  source 1..1416: mol_type = other DNA

SEQ ID NO: 2003 - protein, 449 aa, synthetic construct; identical to SEQ ID NO: 1889
  REGION 1..449: note = Synthetic

SEQ ID NO: 2004 - DNA, 1416 bp, synthetic construct; identical to SEQ ID NO: 1890
  misc_feature 1..1416: note = Synthetic
  source 1..1416: mol_type = other DNA

SEQ ID NO: 2005 - protein, 449 aa, synthetic construct; identical to SEQ ID NO: 1889
  REGION 1..449: note = Synthetic

SEQ ID NO: 2006 - DNA, 1416 bp, synthetic construct; identical to SEQ ID NO: 1890
  misc_feature 1..1416: note = Synthetic
  source 1..1416: mol_type = other DNA

SEQ ID NO: 2007 - protein, 449 aa, synthetic construct; identical to SEQ ID NO: 1889
  REGION 1..449: note = Synthetic

SEQ ID NO: 2008 - DNA, 1416 bp, synthetic construct; identical to SEQ ID NO: 1890
  misc_feature 1..1416: note = Synthetic
  source 1..1416: mol_type = other DNA

SEQ ID NO: 2009 - protein, 622 aa, synthetic construct
  REGION 1..622: note = Synthetic
QVQLVQSGAEVTKPGASVKVSCKASGYTFTRYDINWVRQATGQGLEWMGWMNPNSGNSGSVQKFRGRVTMTRDTSITTVYMELSSLRSDDTAVYYCARGGISSSWHWAFDIWGQGTMVTVSSASTKGPSVFPLAPSSKSTSGGTAALGCLVKDYFPEPVTVSWNSGALTSGVHTFPAVLQSSGLYSLSSVVTVPSSSLGTQTYICNVNHKPSNTKVDKKVEPKSCDKTHTCPPCPAPELLGGPSVFLFPPKPKDTLMISRTPEVTCVVVDVSHEDPEVKFNWYVDGVEVHNAKTKPCEEQYGSTYRCVSVLTVLHQDWLNGKEYKCKVSNKALPAPIEKTISKAKGQPREPQVYTLPPSREEMTKNQVSLTCLVKGFYPSDIAVEWESNGQPENNYKTTPPVLDSDGSFFLYSKLTVDKSRWQQGNVFSCSVMHEALHNHYTQKSLSLSPGGGGGSSPGQGTQSENSCTHYPGNLPNMLRDLRDAFSRVKTFFQMKDQLDNKLLKESLLEDFKGYLGCQALSEMIQFYLEEVMPQAENQDPDIKAHVNSLGENLKTLRLRLRRCHRFLPCENGGGSGGKSKAVEQVKNAFNKLQEKGIYKAMSEFDIFINYIEAYMTMKIRN

SEQ ID NO: 2010 - protein, 214 aa, synthetic construct
  REGION 1..214: note = Synthetic
DIQMTQSPSSLSASVGDRVTITCQASQDINNHLNWYQQKPGKAPKLLIYGAYTLETGVPSRFSGSGSGTDFTFTISSLQPEDIATYYCQQYDKLPLTFGGGTKVEIKRTVAAPSVFIFPPSDEQLKSGTASVVCLLNNFYPREAKVQWKVDNALQSGNSQESVTEQDSKDSTYSLSSTLTLSKADYEKHKVYACEVTHQGLSSPVTKSFNRGEC

SEQ ID NO: 2011 - protein, 449 aa, synthetic construct
  REGION 1..449: note = Synthetic
EVQVLESGGGLVQPGGSLRLSCAASGFTFNAYAMSWVRQAPGKGLEWVSTISGSGSTTYYADSVKGRFTISRDNSKNTLDLQMNSLRAADTAVYYCAKVAGSNFFFDHWGQGTLVTVSSASTKGPSVFPLAPSSKSTSGGTAALGCLVKDYFPEPVTVSWNSGALTSGVHTFPAVLQSSGLYSLSSVVTVPSSSLGTQTYICNVNHKPSNTKVDKKVEPKSCDKTHTCPPCPAPELLGGPSVFLFPPKPKDTLMISRTPEVTCVVVDVSHEDPEVKFNWYVDGVEVHNAKTKPCEEQYGSTYRCVSVLTVLHQDWLNGKEYKCKVSNKALPAPIEKTISKAKGQPREPQVYTLPPSREEMTKNQVSLTCLVKGFYPSDIAVEWESNGQPENNYKTTPPVLDSDGSFFLYSKLTVDKSRWQQGNVFSCSVMHEALHNHYTQKSLSLSPGK

SEQ ID NO: 2012 - DNA, 1416 bp, synthetic construct; identical to SEQ ID NO: 1884
  misc_feature 1..1416: note = Synthetic
  source 1..1416: mol_type = other DNA

SEQ ID NO: 2013 - protein, 449 aa, synthetic construct; identical to SEQ ID NO: 2011
  REGION 1..449: note = Synthetic

SEQ ID NO: 2014 - DNA, 1416 bp, synthetic construct; identical to SEQ ID NO: 1884
  misc_feature 1..1416: note = Synthetic
  source 1..1416: mol_type = other DNA

SEQ ID NO: 2015 - protein, 449 aa, synthetic construct; identical to SEQ ID NO: 2011
  REGION 1..449: note = Synthetic

SEQ ID NO: 2016 - DNA, 1416 bp, synthetic construct; identical to SEQ ID NO: 1884
  misc_feature 1..1416: note = Synthetic
  source 1..1416: mol_type = other DNA

SEQ ID NO: 2017 - protein, 449 aa, synthetic construct; identical to SEQ ID NO: 2011
  REGION 1..449: note = Synthetic

SEQ ID NO: 2018 - DNA, 1416 bp, synthetic construct; identical to SEQ ID NO: 1884
  misc_feature 1..1416: note = Synthetic
  source 1..1416: mol_type = other DNA

SEQ ID NO: 2019 - protein, 449 aa, synthetic construct; identical to SEQ ID NO: 2011
  REGION 1..449: note = Synthetic

SEQ ID NO: 2020 - DNA, 1416 bp, synthetic construct; identical to SEQ ID NO: 1884
  misc_feature 1..1416: note = Synthetic
  source 1..1416: mol_type = other DNA

SEQ ID NO: 2021 - protein, 449 aa, synthetic construct; identical to SEQ ID NO: 2011
  REGION 1..449: note = Synthetic

SEQ ID NO: 2022 - DNA, 1416 bp, synthetic construct; identical to SEQ ID NO: 1884
  misc_feature 1..1416: note = Synthetic
  source 1..1416: mol_type = other DNA

SEQ ID NO: 2023 - protein, 449 aa, synthetic construct; identical to SEQ ID NO: 2011
  REGION 1..449: note = Synthetic

SEQ ID NO: 2024 - DNA, 1416 bp, synthetic construct; identical to SEQ ID NO: 1884
  misc_feature 1..1416: note = Synthetic
  source 1..1416: mol_type = other DNA

SEQ ID NO: 2025 - protein, 449 aa, synthetic construct; identical to SEQ ID NO: 2011
  REGION 1..449: note = Synthetic

SEQ ID NO: 2026 - DNA, 1416 bp, synthetic construct; identical to SEQ ID NO: 1884
  misc_feature 1..1416: note = Synthetic
  source 1..1416: mol_type = other DNA

SEQ ID NO: 2027 - protein, 449 aa, synthetic construct; identical to SEQ ID NO: 2011
  REGION 1..449: note = Synthetic

SEQ ID NO: 2028 - DNA, 1416 bp, synthetic construct; identical to SEQ ID NO: 1884
  misc_feature 1..1416: note = Synthetic
  source 1..1416: mol_type = other DNA

SEQ ID NO: 2029 - protein, 449 aa, synthetic construct; identical to SEQ ID NO: 2011
  REGION 1..449: note = Synthetic

SEQ ID NO: 2030 - DNA, 1416 bp, synthetic construct; identical to SEQ ID NO: 1884
  misc_feature 1..1416: note = Synthetic
  source 1..1416: mol_type = other DNA

SEQ ID NO: 2031 - protein, 449 aa, synthetic construct
  REGION 1..449: note = Synthetic
EVQLLESGGGLVQPGGSLRLSCAASGFTFNAYAMSWVRQAPGKGLEWVSTISGSGSTTYYADSVKGRFTISRDNSKNTLDLQMNSLRAEDTAVYYCAKVAGSNFFFDHWGQGTLVTVSSASTKGPSVFPLAPSSKSTSGGTAALGCLVKDYFPEPVTVSWNSGALTSGVHTFPAVLQSSGLYSLSSVVTVPSSSLGTQTYICNVNHKPSNTKVDKKVEPKSCDKTHTCPPCPAPELLGGPSVFLFPPKPKDTLMISRTPEVTCVVVDVSHEDPEVKFNWYVDGVEVHNAKTKPCEEQYGSTYRCVSVLTVLHQDWLNGKEYKCKVSNKALPAPIEKTISKAKGQPREPQVYTLPPSREEMTKNQVSLTCLVKGFYPSDIAVEWESNGQPENNYKTTPPVLDSDGSFFLYSKLTVDKSRWQQGNVFSCSVMHEALHNHYTQKSLSLSPGK

SEQ ID NO: 2032 - DNA, 1416 bp, synthetic construct; identical to SEQ ID NO: 1884
  misc_feature 1..1416: note = Synthetic
  source 1..1416: mol_type = other DNA

SEQ ID NO: 2033 - protein, 449 aa, synthetic construct; identical to SEQ ID NO: 2031
  REGION 1..449: note = Synthetic

SEQ ID NO: 2034 - DNA, 1416 bp, synthetic construct; identical to SEQ ID NO: 1884
  misc_feature 1..1416: note = Synthetic
  source 1..1416: mol_type = other DNA

SEQ ID NO: 2035 - protein, 449 aa, synthetic construct; identical to SEQ ID NO: 2031
  REGION 1..449: note = Synthetic

SEQ ID NO: 2036 - DNA, 1416 bp, synthetic construct; identical to SEQ ID NO: 1884
  misc_feature 1..1416: note = Synthetic
  source 1..1416: mol_type = other DNA

SEQ ID NO: 2037 - protein, 449 aa, synthetic construct; identical to SEQ ID NO: 2031
  REGION 1..449: note = Synthetic

SEQ ID NO: 2038 - DNA, 1416 bp, synthetic construct; identical to SEQ ID NO: 1884
  misc_feature 1..1416: note = Synthetic
  source 1..1416: mol_type = other DNA

SEQ ID NO: 2039 - protein, 449 aa, synthetic construct; identical to SEQ ID NO: 2031
  REGION 1..449: note = Synthetic

SEQ ID NO: 2040 - DNA, 1416 bp, synthetic construct; identical to SEQ ID NO: 1884
  misc_feature 1..1416: note = Synthetic
  source 1..1416: mol_type = other DNA

SEQ ID NO: 2041 - protein, 449 aa, synthetic construct; identical to SEQ ID NO: 2031
  REGION 1..449: note = Synthetic

SEQ ID NO: 2042 - DNA, 1416 bp, synthetic construct; identical to SEQ ID NO: 1884
  misc_feature 1..1416: note = Synthetic
  source 1..1416: mol_type = other DNA

SEQ ID NO: 2043 - protein, 449 aa, synthetic construct; identical to SEQ ID NO: 2031
  REGION 1..449: note = Synthetic

SEQ ID NO: 2044 - DNA, 1416 bp, synthetic construct; identical to SEQ ID NO: 1884
  misc_feature 1..1416: note = Synthetic
  source 1..1416: mol_type = other DNA

SEQ ID NO: 2045 - protein, 449 aa, synthetic construct; identical to SEQ ID NO: 2031
  REGION 1..449: note = Synthetic

SEQ ID NO: 2046 - DNA, 1416 bp, synthetic construct; identical to SEQ ID NO: 1884
  misc_feature 1..1416: note = Synthetic
  source 1..1416: mol_type = other DNA

SEQ ID NO: 2047 - protein, 449 aa, synthetic construct; identical to SEQ ID NO: 2031
  REGION 1..449: note = Synthetic

SEQ ID NO: 2048 - DNA, 1416 bp, synthetic construct; identical to SEQ ID NO: 1884
  misc_feature 1..1416: note = Synthetic
  source 1..1416: mol_type = other DNA

SEQ ID NO: 2049 - protein, 449 aa, synthetic construct; identical to SEQ ID NO: 2031
  REGION 1..449: note = Synthetic

SEQ ID NO: 2050 - DNA, 1416 bp, synthetic construct; identical to SEQ ID NO: 1884
  misc_feature 1..1416: note = Synthetic
  source 1..1416: mol_type = other DNA

SEQ ID NO: 2051 - protein, 449 aa, synthetic construct; identical to SEQ ID NO: 2031
  REGION 1..449: note = Synthetic

SEQ ID NO: 2052 - DNA, 1416 bp, synthetic construct; identical to SEQ ID NO: 1884
  misc_feature 1..1416: note = Synthetic
  source 1..1416: mol_type = other DNA

SEQ ID NO: 2053 - protein, 449 aa, synthetic construct; identical to SEQ ID NO: 2031
  REGION 1..449: note = Synthetic

SEQ ID NO: 2054 - DNA, 1416 bp, synthetic construct; identical to SEQ ID NO: 1884
  misc_feature 1..1416: note = Synthetic
  source 1..1416: mol_type = other DNA

SEQ ID NO: 2055 - protein, 449 aa, synthetic construct; identical to SEQ ID NO: 2031
  REGION 1..449: note = Synthetic

SEQ ID NO: 2056 - DNA, 1416 bp, synthetic construct; identical to SEQ ID NO: 1884
  misc_feature 1..1416: note = Synthetic
  source 1..1416: mol_type = other DNA

SEQ ID NO: 2057 - protein, 449 aa, synthetic construct; identical to SEQ ID NO: 1891
  REGION 1..449: note = Synthetic

SEQ ID NO: 2058 - DNA, 1416 bp, synthetic construct; identical to SEQ ID NO: 1884
  misc_feature 1..1416: note = Synthetic
  source 1..1416: mol_type = other DNA

SEQ ID NO: 2059 - protein, 449 aa, synthetic construct; identical to SEQ ID NO: 1891
  REGION 1..449: note = Synthetic

SEQ ID NO: 2060 - DNA, 1416 bp, synthetic construct; identical to SEQ ID NO: 1884
  misc_feature 1..1416: note = Synthetic
  source 1..1416: mol_type = other DNA

SEQ ID NO: 2061 - protein, 449 aa, synthetic construct; identical to SEQ ID NO: 1891
  REGION 1..449: note = Synthetic

SEQ ID NO: 2062 - DNA, 1416 bp, synthetic construct; identical to SEQ ID NO: 1884
  misc_feature 1..1416: note = Synthetic
  source 1..1416: mol_type = other DNA

SEQ ID NO: 2063 - protein, 449 aa, synthetic construct; identical to SEQ ID NO: 1891
  REGION 1..449: note = Synthetic

SEQ ID NO: 2064 - DNA, 1416 bp, synthetic construct; identical to SEQ ID NO: 1884
  misc_feature 1..1416: note = Synthetic
  source 1..1416: mol_type = other DNA

SEQ ID NO: 2065 - protein, 449 aa, synthetic construct; identical to SEQ ID NO: 1891
  REGION 1..449: note = Synthetic

SEQ ID NO: 2066 - DNA, 1416 bp, synthetic construct; identical to SEQ ID NO: 1884
  misc_feature 1..1416: note = Synthetic
  source 1..1416: mol_type = other DNA

SEQ ID NO: 2067 - protein, 449 aa, synthetic construct; identical to SEQ ID NO: 1891
  REGION 1..449: note = Synthetic

SEQ ID NO: 2068 - DNA, 1416 bp, synthetic construct; identical to SEQ ID NO: 1884
  misc_feature 1..1416: note = Synthetic
  source 1..1416: mol_type = other DNA

SEQ ID NO: 2069 - protein, 449 aa, synthetic construct; identical to SEQ ID NO: 1891
  REGION 1..449: note = Synthetic

SEQ ID NO: 2070 - DNA, 1416 bp, synthetic construct; identical to SEQ ID NO: 1884
  misc_feature 1..1416: note = Synthetic
  source 1..1416: mol_type = other DNA

SEQ ID NO: 2071 - protein, 449 aa, synthetic construct; identical to SEQ ID NO: 1891
  REGION 1..449: note = Synthetic

SEQ ID NO: 2072 - DNA, 1416 bp, synthetic construct; identical to SEQ ID NO: 1884
  misc_feature 1..1416: note = Synthetic
  source 1..1416: mol_type = other DNA

SEQ ID NO: 2073 - protein, 449 aa, synthetic construct; identical to SEQ ID NO: 1891
  REGION 1..449: note = Synthetic

SEQ ID NO: 2074 - DNA, 1416 bp, synthetic construct; identical to SEQ ID NO: 1884
  misc_feature 1..1416: note = Synthetic
  source 1..1416: mol_type = other DNA

SEQ ID NO: 2075 - protein, 449 aa, synthetic construct
  REGION 1..449: note = Synthetic
EVQLLESGGGLVQPGGSLRLSCAVSGFTFSRYAMSWVRQAPGKGLEWVSEMRGSSGSTYYADSVKGRFTISRDNSKNTLYLQMNSLRVEDTAIYYCAKEFSSNSLFDYWGQGTLVTVSSASTKGPSVFPLAPSSKSTSGGTAALGCLVKDYFPEPVTVSWNSGALTSGVHTFPAVLQSSGLYSLSSVVTVPSSSLGTQTYICNVNHKPSNTKVDKKVEPKSCDKTHTCPPCPAPELLGGPSVFLFPPKPKDTLMISRTPEVTCVVVDVSHEDPEVKFNWYVDGVEVHNAKTKPCEEQYGSTYRCVSVLTVLHQDWLNGKEYKCKVSNKALPAPIEKTISKAKGQPREPQVYTLPPSREEMTKNQVSLTCLVKGFYPSDIAVEWESNGQPENNYKTTPPVLDSDGSFFLYSKLTVDKSRWQQGNVFSCSVMHEALHNHYTQKSLSLSPGK

SEQ ID NO: 2076 - DNA, 1416 bp, synthetic construct; identical to SEQ ID NO: 1884
  misc_feature 1..1416: note = Synthetic
  source 1..1416: mol_type = other DNA

SEQ ID NO: 2077 - protein, 449 aa, synthetic construct; identical to SEQ ID NO: 2075
  REGION 1..449: note = Synthetic

SEQ ID NO: 2078 - DNA, 1416 bp, synthetic construct; identical to SEQ ID NO: 1884
  misc_feature 1..1416: note = Synthetic
  source 1..1416: mol_type = other DNA

SEQ ID NO: 2079 - protein, 449 aa, synthetic construct; identical to SEQ ID NO: 2075
  REGION 1..449: note = Synthetic

SEQ ID NO: 2080 - DNA, 1416 bp, synthetic construct; identical to SEQ ID NO: 1884
  misc_feature 1..1416: note = Synthetic
  source 1..1416: mol_type = other DNA

SEQ ID NO: 2081 - protein, 449 aa, synthetic construct; identical to SEQ ID NO: 2075
  REGION 1..449: note = Synthetic

SEQ ID NO: 2082 - DNA, 1416 bp, synthetic construct; identical to SEQ ID NO: 1884
  misc_feature 1..1416: note = Synthetic
  source 1..1416: mol_type = other DNA

SEQ ID NO: 2083 - protein, 449 aa, synthetic construct; identical to SEQ ID NO: 2075
  REGION 1..449: note = Synthetic

SEQ ID NO: 2084 - DNA, 1416 bp, synthetic construct; identical to SEQ ID NO: 1884
  misc_feature 1..1416: note = Synthetic
  source 1..1416: mol_type = other DNA

SEQ ID NO: 2085 - protein, 449 aa, synthetic construct; identical to SEQ ID NO: 2075
  REGION 1..449: note = Synthetic

SEQ ID NO: 2086 - DNA, 1416 bp, synthetic construct; identical to SEQ ID NO: 1884
  misc_feature 1..1416: note = Synthetic
  source 1..1416: mol_type = other DNA

SEQ ID NO: 2087 - protein, 449 aa, synthetic construct; identical to SEQ ID NO: 2075
  REGION 1..449: note = Synthetic

SEQ ID NO: 2088 - DNA, 1416 bp, synthetic construct; identical to SEQ ID NO: 1884
  misc_feature 1..1416: note = Synthetic
  source 1..1416: mol_type = other DNA

SEQ ID NO: 2089 - protein, 449 aa, synthetic construct; identical to SEQ ID NO: 2075
  REGION 1..449: note = Synthetic

SEQ ID NO: 2090 - DNA, 1416 bp, synthetic construct; identical to SEQ ID NO: 1884
  misc_feature 1..1416: note = Synthetic
  source 1..1416: mol_type = other DNA

SEQ ID NO: 2091 - protein, 449 aa, synthetic construct; identical to SEQ ID NO: 2075
  REGION 1..449: note = Synthetic

SEQ ID NO: 2092 - DNA, 1416 bp, synthetic construct; identical to SEQ ID NO: 1884
  misc_feature 1..1416: note = Synthetic
  source 1..1416: mol_type = other DNA

SEQ ID NO: 2093 - protein, 449 aa, synthetic construct; identical to SEQ ID NO: 2075
  REGION 1..449: note = Synthetic

SEQ ID NO: 2094 - DNA, 1416 bp, synthetic construct; identical to SEQ ID NO: 1884
  misc_feature 1..1416: note = Synthetic
  source 1..1416: mol_type = other DNA

SEQ ID NO: 2095 - protein, 449 aa, synthetic construct; identical to SEQ ID NO: 2075
  REGION 1..449: note = Synthetic

SEQ ID NO: 2096 - DNA, 1416 bp, synthetic construct; identical to SEQ ID NO: 1884
  misc_feature 1..1416: note = Synthetic
  source 1..1416: mol_type = other DNA

SEQ ID NO: 2097 - protein, 449 aa, synthetic construct; identical to SEQ ID NO: 2075
  REGION 1..449: note = Synthetic

SEQ ID NO: 2098 - DNA, 1416 bp, synthetic construct; identical to SEQ ID NO: 1884
  misc_feature 1..1416: note = Synthetic
  source 1..1416: mol_type = other DNA

SEQ ID NO: 2099 - protein, 449 aa, synthetic construct; identical to SEQ ID NO: 2075
  REGION 1..449: note = Synthetic

SEQ ID NO: 2100 - DNA, 1416 bp, synthetic construct; identical to SEQ ID NO: 1884
  misc_feature 1..1416: note = Synthetic
  source 1..1416: mol_type = other DNA

SEQ ID NO: 2101 - protein, 446 aa, synthetic construct
  REGION 1..446: note = Synthetic
EVQLVESGGGLVQPGGSLRLSCAASGFTFSSNWMSWVRQAPGKGLDWVASMKQDGSEIYYVDSVKGRFTISRDNAKNSLHLQMNSLRAEDTAVYYCVRGGWRFESWGQGTLVTVSSASTKGPSVFPLAPSSKSTSGGTAALGCLVKDYFPEPVTVSWNSGALTSGVHTFPAVLQSSGLYSLSSVVTVPSSSLGTQTYICNVNHKPSNTKVDKKVEPKSCDKTHTCPPCPAPELLGGPSVFLFPPKPKDTLMISRTPEVTCVVVDVSHEDPEVKFNWYVDGVEVHNAKTKPCEEQYGSTYRCVSVLTVLHQDWLNGKEYKCKVSNKALPAPIEKTISKAKGQPREPQVYTLPPSREEMTKNQVSLTCLVKGFYPSDIAVEWESNGQPENNYKTTPPVLDSDGSFFLYSKLTVDKSRWQQGNVFSCSVMHEALHNHYTQKSLSLSPGK

SEQ ID NO: 2102 - DNA, 1416 bp, synthetic construct; identical to SEQ ID NO: 1884
  misc_feature 1..1416: note = Synthetic
  source 1..1416: mol_type = other DNA

SEQ ID NO: 2103 - protein, 446 aa, synthetic construct; identical to SEQ ID NO: 2101
  REGION 1..446: note = Synthetic

SEQ ID NO: 2104 - DNA, 1416 bp, synthetic construct; identical to SEQ ID NO: 1884
  misc_feature 1..1416: note = Synthetic
  source 1..1416: mol_type = other DNA

SEQ ID NO: 2105 - protein, 446 aa, synthetic construct; identical to SEQ ID NO: 2101
  REGION 1..446: note = Synthetic

SEQ ID NO: 2106 - DNA, 1416 bp, synthetic construct; identical to SEQ ID NO: 1884
  misc_feature 1..1416: note = Synthetic
  source 1..1416: mol_type = other DNA

SEQ ID NO: 2107 - protein, 446 aa, synthetic construct
  REGION 1..446: note = Synthetic
EVQLVESGGGLVQPGGSLRLSCAASGFTFSSNWMSWVRQAPGKGLDWVASIKQDGSEIYYVDSVKGRFTISRDNAKNSLHLQMNSLRAEDTAVYYCVRGGWRFESWGQGTLVTVSSASTKGPSVFPLAPSSKSTSGGTAALGCLVKDYFPEPVTVSWNSGALTSGVHTFPAVLQSSGLYSLSSVVTVPSSSLGTQTYICNVNHKPSNTKVDKKVEPKSCDKTHTCPPCPAPELLGGPSVFLFPPKPKDTLMISRTPEVTCVVVDVSHEDPEVKFNWYVDGVEVHNAKTKPCEEQYGSTYRCVSVLTVLHQDWLNGKEYKCKVSNKALPAPIEKTISKAKGQPREPQVYTLPPSREEMTKNQVSLTCLVKGFYPSDIAVEWESNGQPENNYKTTPPVLDSDGSFFLYSKLTVDKSRWQQGNVFSCSVMHEALHNHYTQKSLSLSPGK

SEQ ID NO: 2108 - DNA, 1416 bp, synthetic construct; identical to SEQ ID NO: 1884
  misc_feature 1..1416: note = Synthetic
  source 1..1416: mol_type = other DNA

SEQ ID NO: 2109 - protein, 446 aa, synthetic construct; identical to SEQ ID NO: 2101
  REGION 1..446: note = Synthetic

SEQ ID NO: 2110 - DNA, 1416 bp, synthetic construct; identical to SEQ ID NO: 1884
  misc_feature 1..1416: note = Synthetic
  source 1..1416: mol_type = other DNA

SEQ ID NO: 2111 - protein, 446 aa, synthetic construct
  REGION 1..446: note = Synthetic
EVQLVESGGGLVQPGGSLRLSCAASGFTFSSNWMSWVRQAPGKGLDWVASMKQHGSEIYYVDSVKGRFTISRDNAKNSLHLQMNSLRAEDTAVYYCVRGGWRFESWGQGTLVTVSSASTKGPSVFPLAPSSKSTSGGTAALGCLVKDYFPEPVTVSWNSGALTSGVHTFPAVLQSSGLYSLSSVVTVPSSSLGTQTYICNVNHKPSNTKVDKKVEPKSCDKTHTCPPCPAPELLGGPSVFLFPPKPKDTLMISRTPEVTCVVVDVSHEDPEVKFNWYVDGVEVHNAKTKPCEEQYGSTYRCVSVLTVLHQDWLNGKEYKCKVSNKALPAPIEKTISKAKGQPREPQVYTLPPSREEMTKNQVSLTCLVKGFYPSDIAVEWESNGQPENNYKTTPPVLDSDGSFFLYSKLTVDKSRWQQGNVFSCSVMHEALHNHYTQKSLSLSPGK

SEQ ID NO: 2112 - DNA, 1416 bp, synthetic construct; identical to SEQ ID NO: 1884
  misc_feature 1..1416: note = Synthetic
  source 1..1416: mol_type = other DNA

SEQ ID NO: 2113 - protein, 446 aa, synthetic construct
  REGION 1..446: note = Synthetic
EVQLVESGGGLVQPGGSLRLSCAASGFTFSSNWMSWVRQAPGKGLDWVASMKQDASEIYYVDSVKGRFTISRDNAKNSLHLQMNSLRAEDTAVYYCVRGGWRFESWGQGTLVTVSSASTKGPSVFPLAPSSKSTSGGTAALGCLVKDYFPEPVTVSWNSGALTSGVHTFPAVLQSSGLYSLSSVVTVPSSSLGTQTYICNVNHKPSNTKVDKKVEPKSCDKTHTCPPCPAPELLGGPSVFLFPPKPKDTLMISRTPEVTCVVVDVSHEDPEVKFNWYVDGVEVHNAKTKPCEEQYGSTYRCVSVLTVLHQDWLNGKEYKCKVSNKALPAPIEKTISKAKGQPREPQVYTLPPSREEMTKNQVSLTCLVKGFYPSDIAVEWESNGQPENNYKTTPPVLDSDGSFFLYSKLTVDKSRWQQGNVFSCSVMHEALHNHYTQKSLSLSPGK

SEQ ID NO: 2114 - DNA, 1416 bp, synthetic construct; identical to SEQ ID NO: 1884
  misc_feature 1..1416: note = Synthetic
  source 1..1416: mol_type = other DNA

SEQ ID NO: 2115 - protein, 446 aa, synthetic construct
  REGION 1..446: note = Synthetic
EVQLVESGGGLVQPGGSLRLSCAASGFTFSSNWMSWVRQAPGKGLDWVASMKQDLSEIYYVDSVKGRFTISRDNAKNSLHLQMNSLRAEDTAVYYCVRGGWRFESWGQGTLVTVSSASTKGPSVFPLAPSSKSTSGGTAALGCLVKDYFPEPVTVSWNSGALTSGVHTFPAVLQSSGLYSLSSVVTVPSSSLGTQTYICNVNHKPSNTKVDKKVEPKSCDKTHTCPPCPAPELLGGPSVFLFPPKPKDTLMISRTPEVTCVVVDVSHEDPEVKFNWYVDGVEVHNAKTKPCEEQYGSTYRCVSVLTVLHQDWLNGKEYKCKVSNKALPAPIEKTISKAKGQPREPQVYTLPPSREEMTKNQVSLTCLVKGFYPSDIAVEWESNGQPENNYKTTPPVLDSDGSFFLYSKLTVDKSRWQQGNVFSCSVMHEALHNHYTQKSLSLSPGK

SEQ ID NO: 2116 - DNA, 1416 bp, synthetic construct; identical to SEQ ID NO: 1884
  misc_feature 1..1416: note = Synthetic
  source 1..1416: mol_type = other DNA

SEQ ID NO: 2117 - protein, 446 aa, synthetic construct
  REGION 1..446: note = Synthetic
EVQLVESGGGLVQPGGSLRLSCAASGFTFSSNWMSWVRQAPGKGLDWVASMKQDGSEIYYVESVKGRFTISRDNAKNSLHLQMNSLRAEDTAVYYCVRGGWRFESWGQGTLVTVSSASTKGPSVFPLAPSSKSTSGGTAALGCLVKDYFPEPVTVSWNSGALTSGVHTFPAVLQSSGLYSLSSVVTVPSSSLGTQTYICNVNHKPSNTKVDKKVEPKSCDKTHTCPPCPAPELLGGPSVFLFPPKPKDTLMISRTPEVTCVVVDVSHEDPEVKFNWYVDGVEVHNAKTKPCEEQYGSTYRCVSVLTVLHQDWLNGKEYKCKVSNKALPAPIEKTISKAKGQPREPQVYTLPPSREEMTKNQVSLTCLVKGFYPSDIAVEWESNGQPENNYKTTPPVLDSDGSFFLYSKLTVDKSRWQQGNVFSCSVMHEALHNHYTQKSLSLSPGK

SEQ ID NO: 2118 - DNA, 1416 bp, synthetic construct; identical to SEQ ID NO: 1884
  misc_feature 1..1416: note = Synthetic
  source 1..1416: mol_type = other DNA

SEQ ID NO: 2119 - protein, 446 aa, synthetic construct
  REGION 1..446: note = Synthetic
EVQLVESGGGLVQPGGSLRLSCAASGFTFSSNWMSWVRQAPGKGLDWVASIKQDASEIYYVDAVKGRFTISRDNAKNSLHLQMNSLRAEDTAVYYCVRGGWRFESWGQGTLVTVSSASTKGPSVFPLAPSSKSTSGGTAALGCLVKDYFPEPVTVSWNSGALTSGVHTFPAVLQSSGLYSLSSVVTVPSSSLGTQTYICNVNHKPSNTKVDKKVEPKSCDKTHTCPPCPAPELLGGPSVFLFPPKPKDTLMISRTPEVTCVVVDVSHEDPEVKFNWYVDGVEVHNAKTKPCEEQYGSTYRCVSVLTVLHQDWLNGKEYKCKVSNKALPAPIEKTISKAKGQPREPQVYTLPPSREEMTKNQVSLTCLVKGFYPSDIAVEWESNGQPENNYKTTPPVLDSDGSFFLYSKLTVDKSRWQQGNVFSCSVMHEALHNHYTQKSLSLSPGK

SEQ ID NO: 2120 - DNA, 1416 bp, synthetic construct; identical to SEQ ID NO: 1884
  misc_feature 1..1416: note = Synthetic
  source 1..1416: mol_type = other DNA

SEQ ID NO: 2121 - protein, 446 aa, synthetic construct; identical to SEQ ID NO: 2119
  REGION 1..446: note = Synthetic

SEQ ID NO: 2122 - DNA, 1416 bp, synthetic construct; identical to SEQ ID NO: 1884
  misc_feature 1..1416: note = Synthetic
  source 1..1416: mol_type = other DNA

SEQ ID NO: 2123 - protein, 446 aa, synthetic construct; identical to SEQ ID NO: 2119
  REGION 1..446: note = Synthetic

SEQ ID NO: 2124 - DNA, 1416 bp, synthetic construct; identical to SEQ ID NO: 1884
  misc_feature 1..1416: note = Synthetic
  source 1..1416: mol_type = other DNA

SEQ ID NO: 2125 - protein, 446 aa, synthetic construct; identical to SEQ ID NO: 2119
  REGION 1..446: note = Synthetic

SEQ ID NO: 2126 - DNA, 1416 bp, synthetic construct; identical to SEQ ID NO: 1884
  misc_feature 1..1416: note = Synthetic
  source 1..1416: mol_type = other DNA

SEQ ID NO: 2127 - protein, 446 aa, synthetic construct
  REGION 1..446: note = Synthetic
EVQLVESGGGLVQPGGSLRLSCAASGFTFSSNWMSWVRQAPGKGLDWVASIKQDASEIYYVESVKGRFTISRDNAKNSLHLQMNSLRAEDTAVYYCVRGGWRFESWGQGTLVTVSSASTKGPSVFPLAPSSKSTSGGTAALGCLVKDYFPEPVTVSWNSGALTSGVHTFPAVLQSSGLYSLSSVVTVPSSSLGTQTYICNVNHKPSNTKVDKKVEPKSCDKTHTCPPCPAPELLGGPSVFLFPPKPKDTLMISRTPEVTCVVVDVSHEDPEVKFNWYVDGVEVHNAKTKPCEEQYGSTYRCVSVLTVLHQDWLNGKEYKCKVSNKALPAPIEKTISKAKGQPREPQVYTLPPSREEMTKNQVSLTCLVKGFYPSDIAVEWESNGQPENNYKTTPPVLDSDGSFFLYSKLTVDKSRWQQGNVFSCSVMHEALHNHYTQKSLSLSPGK

SEQ ID NO: 2128 - DNA, 1416 bp, synthetic construct; identical to SEQ ID NO: 1884
  misc_feature 1..1416: note = Synthetic
  source 1..1416: mol_type = other DNA

SEQ ID NO: 2129 - protein, 446 aa, synthetic construct; identical to SEQ ID NO: 2127
  REGION 1..446: note = Synthetic

SEQ ID NO: 2130 - DNA, 1416 bp, synthetic construct; identical to SEQ ID NO: 1884
  misc_feature 1..1416: note = Synthetic
  source 1..1416: mol_type = other DNA

SEQ ID NO: 2131 - protein, 446 aa, synthetic construct; identical to SEQ ID NO: 2127
  REGION 1..446: note = Synthetic

SEQ ID NO: 2132 - DNA, 1416 bp, synthetic construct; identical to SEQ ID NO: 1884
  misc_feature 1..1416: note = Synthetic
  source 1..1416: mol_type = other DNA

SEQ ID NO: 2133 - protein, 446 aa, synthetic construct; identical to SEQ ID NO: 2127
  REGION 1..446: note = Synthetic

SEQ ID NO: 2134 - DNA, 1416 bp, synthetic construct; identical to SEQ ID NO: 1884
  misc_feature 1..1416: note = Synthetic
  source 1..1416: mol_type = other DNA

SEQ ID NO: 2135 - protein, 446 aa, synthetic construct
  REGION 1..446: note = Synthetic
EVQLVESGGGLVQPGGSLRLSCAASGFTFSSNWMSWVRQAPGKGLDWVASMKQDGSEIYYVDAVKGRFTISRDNAKNSLHLQMNSLRAEDTAVYYCVRGGWRFESWGQGTLVTVSSASTKGPSVFPLAPSSKSTSGGTAALGCLVKDYFPEPVTVSWNSGALTSGVHTFPAVLQSSGLYSLSSVVTVPSSSLGTQTYICNVNHKPSNTKVDKKVEPKSCDKTHTCPPCPAPELLGGPSVFLFPPKPKDTLMISRTPEVTCVVVDVSHEDPEVKFNWYVDGVEVHNAKTKPCEEQYGSTYRCVSVLTVLHQDWLNGKEYKCKVSNKALPAPIEKTISKAKGQPREPQVYTLPPSREEMTKNQVSLTCLVKGFYPSDIAVEWESNGQPENNYKTTPPVLDSDGSFFLYSKLTVDKSRWQQGNVFSCSVMHEALHNHYTQKSLSLSPGK

SEQ ID NO: 2136 - DNA, 1416 bp, synthetic construct; identical to SEQ ID NO: 1884
  misc_feature 1..1416: note = Synthetic
  source 1..1416: mol_type = other DNA

SEQ ID NO: 2137 - protein, 622 aa, synthetic construct
  REGION 1..622: note = Synthetic
QVQLVQSGAEVTKPGASVKVSCKASGYTFTRYDINWVRQATGQGLEWMGWMNPNSGNSGSVQKFRGRVTMTRDTSITTVYMELSSLRSDDTAVYYCARGGISSSWHWAFDIWGQGTMVTVSSASTKGPSVFPLAPSSKSTSGGTAALGCLVKDYFPEPVTVSWNSGALTSGVHTFPAVLQSSGLYSLSSVVTVPSSSLGTQTYICNVNHKPSNTKVDKKVEPKSCDKTHTCPPCPAPELLGGPSVFLFPPKPKDTLMISRTPEVTCVVVDVSHEDPEVKFNWYVDGVEVHNAKTKPCEEQYGSTYRCVSVLTVLHQDWLNGKEYKCKVSNKALPAPIEKTISKAKGQPREPQVYTLPPSREEMTKNQVSLTCLVKGFYPSDIAVEWESNGQPENNYKTTPPVLDSDGSFFLYSKLTVDKSRWQQGNVFSCSVMHEALHNHYTQKSLSLSPGGGGGSSPGQGTQSENSCTHFPGNLPNMLRDLRDAFSRVKTFFQMKDQLDNLLLKESLLEDFKGYLGCQALSEMIQFYLEEVMPQAENQDPDIKAHVNSLGENLKTLRLRLRRCHRFLPCENGGGSGGKSKAVEQVKNAFNQLQEKGIYDAMSEFDIFINYIEAYMTMKIRN

SEQ ID NO: 2138 - protein, 166 aa, synthetic construct
  REGION 1..166: note = Synthetic
SPGQGTQSENSCTHFPGNLPNMLRDLRDAFSRVKTFFQMKDQLDNLLLKESLLEDFKGYLGCQALSEMIQFYLEEVMPQAENQDPDIKAHVNSLGENLKTLRLRLRRCHRFLPCENGGGSGGKSKAVEQVKNAFNQLQEKGIYDAMSEFDIFINYIEAYMTMKIRN

SEQ ID NO: 2139 - protein, 622 aa, synthetic construct
  REGION 1..622: note = Synthetic
QVQLVQSGAEVTKPGASVKVSCKASGYTFTRYDINWVRQATGQGLEWMGWMNPNSGNSGSVQKFRGRVTMTRDTSITTVYMELSSLRSDDTAVYYCARGGISSSWHWAFDIWGQGTMVTVSSASTKGPSVFPLAPSSKSTSGGTAALGCLVKDYFPEPVTVSWNSGALTSGVHTFPAVLQSSGLYSLSSVVTVPSSSLGTQTYICNVNHKPSNTKVDKKVEPKSCDKTHTCPPCPAPELLGGPSVFLFPPKPKDTLMISRTPEVTCVVVDVSHEDPEVKFNWYVDGVEVHNAKTKPCEEQYGSTYRCVSVLTVLHQDWLNGKEYKCKVSNKALPAPIEKTISKAKGQPREPQVYTLPPSREEMTKNQVSLTCLVKGFYPSDIAVEWESNGQPENNYKTTPPVLDSDGSFFLYSKLTVDKSRWQQGNVFSCSVMHEALHNHYTQKSLSLSPGGGGGSSPGQGTQSENSCTHFPGNLPNMLRDLRDAFSRVKTFFQMKDQLDNLLLKESLLEDFKGYLGCQALSEMIQFYLEEVMPQAENQDPDIKAHVNSLGENLKTLRLRLRRCHRFLPCENGGGSGGKSKAVEQVKNAFNQLQEKGIYKAMSEFDIFINYIEAYMTMKIRN

SEQ ID NO: 2140 - protein, 166 aa, synthetic construct
  REGION 1..166: note = Synthetic
SPGQGTQSENSCTHFPGNLPNMLRDLRDAFSRVKTFFQMKDQLDNLLLKESLLEDFKGYLGCQALSEMIQFYLEEVMPQAENQDPDIKAHVNSLGENLKTLRLRLRRCHRFLPCENGGGSGGKSKAVEQVKNAFNQLQEKGIYKAMSEFDIFINYIEAYMTMKIRN

SEQ ID NO: 2141 - protein, 622 aa, synthetic construct
  REGION 1..622: note = Synthetic
QVQLVQSGAEVTKPGASVKVSCKASGYTFTRYDINWVRQATGQGLEWMGWMNPNSGNSGSVQKFRGRVTMTRDTSITTVYMELSSLRSDDTAVYYCARGGISSSWHWAFDIWGQGTMVTVSSASTKGPSVFPLAPSSKSTSGGTAALGCLVKDYFPEPVTVSWNSGALTSGVHTFPAVLQSSGLYSLSSVVTVPSSSLGTQTYICNVNHKPSNTKVDKKVEPKSCDKTHTCPPCPAPELLGGPSVFLFPPKPKDTLMISRTPEVTCVVVDVSHEDPEVKFNWYVDGVEVHNAKTKPCEEQYGSTYRCVSVLTVLHQDWLNGKEYKCKVSNKALPAPIEKTISKAKGQPREPQVYTLPPSREEMTKNQVSLTCLVKGFYPSDIAVEWESNGQPENNYKTTPPVLDSDGSFFLYSKLTVDKSRWQQGNVFSCSVMHEALHNHYTQKSLSLSPGGGGGSSPGQGTQSENSCTHFPGNLPNMLRDLRDAFSRVKTFFQMKDQLDNLLLKESLLEDFKGYLGCQALSEMIQFYLEEVMPQAENQDPDIKAHVNSLGENLKTLRLRLRRCHRFLPCENGGGSGGKSKAVEQVKNAFNKLQEKGIYDAMSEFDIFINYIEAYMTMNIRN

SEQ ID NO: 2142 - protein, 166 aa, synthetic construct
  REGION 1..166: note = Synthetic
SPGQGTQSENSCTHFPGNLPNMLRDLRDAFSRVKTFFQMKDQLDNLLLKESLLEDFKGYLGCQALSEMIQFYLEEVMPQAENQDPDIKAHVNSLGENLKTLRLRLRRCHRFLPCENGGGSGGKSKAVEQVKNAFNKLQEKGIYDAMSEFDIFINYIEAYMTMNIRN

SEQ ID NO: 2143 - protein, 622 aa, synthetic construct
  REGION 1..622: note = Synthetic
QVQLVQSGAEVTKPGASVKVSCKASGYTFTRYDINWVRQATGQGLEWMGWMNPNSGNSGSVQKFRGRVTMTRDTSITTVYMELSSLRSDDTAVYYCARGGISSSWHWAFDIWGQGTMVTVSSASTKGPSVFPLAPSSKSTSGGTAALGCLVKDYFPEPVTVSWNSGALTSGVHTFPAVLQSSGLYSLSSVVTVPSSSLGTQTYICNVNHKPSNTKVDKKVEPKSCDKTHTCPPCPAPELLGGPSVFLFPPKPKDTLMISRTPEVTCVVVDVSHEDPEVKFNWYVDGVEVHNAKTKPCEEQYGSTYRCVSVLTVLHQDWLNGKEYKCKVSNKALPAPIEKTISKAKGQPREPQVYTLPPSREEMTKNQVSLTCLVKGFYPSDIAVEWESNGQPENNYKTTPPVLDSDGSFFLYSKLTVDKSRWQQGNVFSCSVMHEALHNHYTQKSLSLSPGGGGGSSPGQGTQSENSCTHFPGNLPNMLRDLRDAFSRVKTFFQMKDQLDNLLLKESLLEDFKGYLGCQALSEMIQFYLEEVMPQAENQDPDIKAHVNSLGENLKTLRLRLRRCHRFLPCENGGGSGGKSKAVEQVKNAFNKLQEKGIYDAMSEFDIFINYIEAYVTMKIRN

SEQ ID NO: 2144 - protein, 166 aa, synthetic construct
  REGION 1..166: note = Synthetic
SPGQGTQSENSCTHFPGNLPNMLRDLRDAFSRVKTFFQMKDQLDNLLLKESLLEDFKGYLGCQALSEMIQFYLEEVMPQAENQDPDIKAHVNSLGENLKTLRLRLRRCHRFLPCENGGGSGGKSKAVEQVKNAFNKLQEKGIYDAMSEFDIFINYIEAYVTMKIRN

SEQ ID NO: 2145 - protein, 622 aa, synthetic construct
  REGION 1..622: note = Synthetic
QVQLVQSGAEVTKPGASVKVSCKASGYTFTRYDINWVRQATGQGLEWMGWMNPNSGNSGSVQKFRGRVTMTRDTSITTVYMELSSLRSDDTAVYYCARGGISSSWHWAFDIWGQGTMVTVSSASTKGPSVFPLAPSSKSTSGGTAALGCLVKDYFPEPVTVSWNSGALTSGVHTFPAVLQSSGLYSLSSVVTVPSSSLGTQTYICNVNHKPSNTKVDKKVEPKSCDKTHTCPPCPAPELLGGPSVFLFPPKPKDTLMISRTPEVTCVVVDVSHEDPEVKFNWYVDGVEVHNAKTKPCEEQYGSTYRCVSVLTVLHQDWLNGKEYKCKVSNKALPAPIEKTISKAKGQPREPQVYTLPPSREEMTKNQVSLTCLVKGFYPSDIAVEWESNGQPENNYKTTPPVLDSDGSFFLYSKLTVDKSRWQQGNVFSCSVMHEALHNHYTQKSLSLSPGGGGGSSPGQGTQSENSCTHFPGNLPNMLRDLRDAFSRVKTFFQMKDQLDNLLLKESLLEDFKGYLGCQALSEMIQFYLEEVMPQAENQDPDIKAHVNSLGENLKTLRLRLRRCHRFLPCENGGGSGGKSKAVEQVKNAFNKLQEKGIYDAMSEFDIFINYIEAYMTMKIRD

SEQ ID NO: 2146 - protein, 166 aa, synthetic construct
  REGION 1..166: note = Synthetic
SPGQGTQSENSCTHFPGNLPNMLRDLRDAFSRVKTFFQMKDQLDNLLLKESLLEDFKGYLGCQALSEMIQFYLEEVMPQAENQDPDIKAHVNSLGENLKTLRLRLRRCHRFLPCENGGGSGGKSKAVEQVKNAFNKLQEKGIYDAMSEFDIFINYIEAYMTMKIRD

SEQ ID NO: 2147 - protein, 622 aa, synthetic construct
  REGION 1..622: note = Synthetic
QVQLVQSGAEVTKPGASVKVSCKASGYTFTRYDINWVRQATGQGLEWMGWMNPNSGNSGSVQKFRGRVTMTRDTSITTVYMELSSLRSDDTAVYYCARGGISSSWHWAFDIWGQGTMVTVSSASTKGPSVFPLAPSSKSTSGGTAALGCLVKDYFPEPVTVSWNSGALTSGVHTFPAVLQSSGLYSLSSVVTVPSSSLGTQTYICNVNHKPSNTKVDKKVEPKSCDKTHTCPPCPAPELLGGPSVFLFPPKPKDTLMISRTPEVTCVVVDVSHEDPEVKFNWYVDGVEVHNAKTKPCEEQYGSTYRCVSVLTVLHQDWLNGKEYKCKVSNKALPAPIEKTISKAKGQPREPQVYTLPPSREEMTKNQVSLTCLVKGFYPSDIAVEWESNGQPENNYKTTPPVLDSDGSFFLYSKLTVDKSRWQQGNVFSCSVMHEALHNHYTQKSLSLSPGGGGGSSPGQGTQSENSCTHFPGNLPNMLRDLRDAFSRVKTFFQMKDQLDNLLLKESLLEDFKGYLGCQALSEMIQFYLEEVMPQAENQDPDIKAHVNSLGENLKTLRLRLRRCHRFLPCENAGGSGGKSKAVEQVKNAFNKLQEKGIYDAMSEFDIFINYIEAYMTMKIRN

SEQ ID NO: 2148 - protein, 166 aa, synthetic construct
  REGION 1..166: note = Synthetic
SPGQGTQSENSCTHFPGNLPNMLRDLRDAFSRVKTFFQMKDQLDNLLLKESLLEDFKGYLGCQALSEMIQFYLEEVMPQAENQDPDIKAHVNSLGENLKTLRLRLRRCHRFLPCENAGGSGGKSKAVEQVKNAFNKLQEKGIYDAMSEFDIFINYIEAYMTMKIRN

SEQ ID NO: 2149 - protein, 622 aa, synthetic construct
  REGION 1..622: note = Synthetic
QVQLVQSGAEVTKPGASVKVSCKASGYTFTRYDINWVRQATGQGLEWMGWMNPNSGNSGSVQKFRGRVTMTRDTSITTVYMELSSLRSDDTAVYYCARGGISSSWHWAFDIWGQGTMVTVSSASTKGPSVFPLAPSSKSTSGGTAALGCLVKDYFPEPVTVSWNSGALTSGVHTFPAVLQSSGLYSLSSVVTVPSSSLGTQTYICNVNHKPSNTKVDKKVEPKSCDKTHTCPPCPAPELLGGPSVFLFPPKPKDTLMISRTPEVTCVVVDVSHEDPEVKFNWYVDGVEVHNAKTKPCEEQYGSTYRCVSVLTVLHQDWLNGKEYKCKVSNKALPAPIEKTISKAKGQPREPQVYTLPPSREEMTKNQVSLTCLVKGFYPSDIAVEWESNGQPENNYKTTPPVLDSDGSFFLYSKLTVDKSRWQQGNVFSCSVMHEALHNHYTQKSLSLSPGGGGGSSPGQGTQSENSCTHFPGNLPNMLRDLRDAFSRVKTFFQMKDQLDNLLLKESLLEDFKGYLGCQALSEMIQFYLEEVMPQAENQDPDIKAHVNSLGENLKTLRLRLRRCHRFLPCENVGGSGGKSKAVEQVKNAFNKLQEKGIYDAMSEFDIFINYIEAYMTMKIRN

SEQ ID NO: 2150 - protein, 166 aa, synthetic construct
  REGION 1..166: note = Synthetic
SPGQGTQSENSCTHFPGNLPNMLRDLRDAFSRVKTFFQMKDQLDNLLLKESLLEDFKGYLGCQALSEMIQFYLEEVMPQAENQDPDIKAHVNSLGENLKTLRLRLRRCHRFLPCENVGGSGGKSKAVEQVKNAFNKLQEKGIYDAMSEFDIFINYIEAYMTMKIRN

SEQ ID NO: 2151 - protein, 622 aa, synthetic construct
  REGION 1..622: note = Synthetic
QVQLVQSGAEVTKPGASVKVSCKASGYTFTRYDINWVRQATGQGLEWMGWMNPNSGNSGSVQKFRGRVTMTRDTSITTVYMELSSLRSDDTAVYYCARGGISSSWHWAFDIWGQGTMVTVSSASTKGPSVFPLAPSSKSTSGGTAALGCLVKDYFPEPVTVSWNSGALTSGVHTFPAVLQSSGLYSLSSVVTVPSSSLGTQTYICNVNHKPSNTKVDKKVEPKSCDKTHTCPPCPAPELLGGPSVFLFPPKPKDTLMISRTPEVTCVVVDVSHEDPEVKFNWYVDGVEVHNAKTKPCEEQYGSTYRCVSVLTVLHQDWLNGKEYKCKVSNKALPAPIEKTISKAKGQPREPQVYTLPPSREEMTKNQVSLTCLVKGFYPSDIAVEWESNGQPENNYKTTPPVLDSDGSFFLYSKLTVDKSRWQQGNVFSCSVMHEALHNHYTQKSLSLSPGGGGGSSPGQGTQSENSCTHFPGNLPNMLRDLRDAFSRVKTFFQMKDQLDNLLLKESLLEDFKGYLGCQALSEMIQFYLEEVMPQAENQDPDIKAHVNSLGENLKTLRLRLRRCHRFLPCENGGGSAGKSKAVEQVKNAFNKLQEKGIYDAMSEFDIFINYIEAYMTMKIRN

SEQ ID NO: 2152 - protein, 166 aa, synthetic construct
  REGION 1..166: note = Synthetic
SPGQGTQSENSCTHFPGNLPNMLRDLRDAFSRVKTFFQMKDQLDNLLLKESLLEDFKGYLGCQALSEMIQFYLEEVMPQAENQDPDIKAHVNSLGENLKTLRLRLRRCHRFLPCENGGGSAGKSKAVEQVKNAFNKLQEKGIYDAMSEFDIFINYIEAYMTMKIRN

SEQ ID NO: 2153 - protein, 622 aa, synthetic construct
  REGION 1..622: note = Synthetic
QVQLVQSGAEVTKPGASVKVSCKASGYTFTRYDINWVRQATGQGLEWMGWMNPNSGNSGSVQKFRGRVTMTRDTSITTVYMELSSLRSDDTAVYYCARGGISSSWHWAFDIWGQGTMVTVSSASTKGPSVFPLAPSSKSTSGGTAALGCLVKDYFPEPVTVSWNSGALTSGVHTFPAVLQSSGLYSLSSVVTVPSSSLGTQTYICNVNHKPSNTKVDKKVEPKSCDKTHTCPPCPAPELLGGPSVFLFPPKPKDTLMISRTPEVTCVVVDVSHEDPEVKFNWYVDGVEVHNAKTKPCEEQYGSTYRCVSVLTVLHQDWLNGKEYKCKVSNKALPAPIEKTISKAKGQPREPQVYTLPPSREEMTKNQVSLTCLVKGFYPSDIAVEWESNGQPENNYKTTPPVLDSDGSFFLYSKLTVDKSRWQQGNVFSCSVMHEALHNHYTQKSLSLSPGGGGGSSPGQGTQSENSCTHFPGNLPNMLRDLRDAFSRVKTFFQMKDQLDNLLLKESLLEDFKGYLGCQALSEMIQFYLEEVMPQAENQDPDIKAHVNSLGENLKTLRLRLRRCHRFLPCENGGGSGGKSKAVEQVKNAFNKLQEKGIYKAMSEFDIFINYIEAYMTMNIRN

SEQ ID NO: 2154 - protein, 166 aa, synthetic construct
  REGION 1..166: note = Synthetic
SPGQGTQSENSCTHFPGNLPNMLRDLRDAFSRVKTFFQMKDQLDNLLLKESLLEDFKGYLGCQALSEMIQFYLEEVMPQAENQDPDIKAHVNSLGENLKTLRLRLRRCHRFLPCENGGGSGGKSKAVEQVKNAFNKLQEKGIYKAMSEFDIFINYIEAYMTMNIRN

SEQ ID NO: 2155 - protein, 622 aa, synthetic construct
  REGION 1..622: note = Synthetic
QVQLVQSGAEVTKPGASVKVSCKASGYTFTRYDINWVRQATGQGLEWMGWMNPNSGNSGSVQKFRGRVTMTRDTSITTVYMELSSLRSDDTAVYYCARGGISSSWHWAFDIWGQGTMVTVSSASTKGPSVFPLAPSSKSTSGGTAALGCLVKDYFPEPVTVSWNSGALTSGVHTFPAVLQSSGLYSLSSVVTVPSSSLGTQTYICNVNHKPSNTKVDKKVEPKSCDKTHTCPPCPAPELLGGPSVFLFPPKPKDTLMISRTPEVTCVVVDVSHEDPEVKFNWYVDGVEVHNAKTKPCEEQYGSTYRCVSVLTVLHQDWLNGKEYKCKVSNKALPAPIEKTISKAKGQPREPQVYTLPPSREEMTKNQVSLTCLVKGFYPSDIAVEWESNGQPENNYKTTPPVLDSDGSFFLYSKLTVDKSRWQQGNVFSCSVMHEALHNHYTQKSLSLSPGGGGGSSPGQGTQSENSCTHFPGNLPNMLRDLRDAFSRVKTFFQMKDQLDNLLLKESLLEDFKGYLGCQALSEMIQFYLEEVMPQAENQDPDIKAHVNSLGENLKTLRLRLRRCHRFLPCENGGGSGGKSKAVEQVKNAFNKLQEKGIYKAMSEFDIFINYIEAYVTMKIRN

SEQ ID NO: 2156 - protein, 166 aa, synthetic construct
  REGION 1..166: note = Synthetic
SPGQGTQSENSCTHFPGNLPNMLRDLRDAFSRVKTFFQMKDQLDNLLLKESLLEDFKGYLGCQALSEMIQFYLEEVMPQAENQDPDIKAHVNSLGENLKTLRLRLRRCHRFLPCENGGGSGGKSKAVEQVKNAFNKLQEKGIYKAMSEFDIFINYIEAYVTMKIRN

SEQ ID NO: 2157 - protein, 622 aa, synthetic construct
  REGION 1..622: note = Synthetic
QVQLVQSGAEVTKPGASVKVSCKASGYTFTRYDINWVRQATGQGLEWMGWMNPNSGNSGSVQKFRGRVTMTRDTSITTVYMELSSLRSDDTAVYYCARGGISSSWHWAFDIWGQGTMVTVSSASTKGPSVFPLAPSSKSTSGGTAALGCLVKDYFPEPVTVSWNSGALTSGVHTFPAVLQSSGLYSLSSVVTVPSSSLGTQTYICNVNHKPSNTKVDKKVEPKSCDKTHTCPPCPAPELLGGPSVFLFPPKPKDTLMISRTPEVTCVVVDVSHEDPEVKFNWYVDGVEVHNAKTKPCEEQYGSTYRCVSVLTVLHQDWLNGKEYKCKVSNKALPAPIEKTISKAKGQPREPQVYTLPPSREEMTKNQVSLTCLVKGFYPSDIAVEWESNGQPENNYKTTPPVLDSDGSFFLYSKLTVDKSRWQQGNVFSCSVMHEALHNHYTQKSLSLSPGGGGGSSPGQGTQSENSCTHFPGNLPNMLRDLRDAFSRVKTFFQMKDQLDNLLLKESLLEDFKGYLGCQALSEMIQFYLEEVMPQAENQDPDIKAHVNSLGENLKTLRLRLRRCHRFLPCENGGGSGGKSKAVEQVKNAFNKLQEKGIYKAMSEFDIFINYIEAYMTMKIRD

SEQ ID NO: 2158 - protein, 166 aa, synthetic construct
  REGION 1..166: note = Synthetic
SPGQGTQSENSCTHFPGNLPNMLRDLRDAFSRVKTFFQMKDQLDNLLLKESLLEDFKGYLGCQALSEMIQFYLEEVMPQAENQDPDIKAHVNSLGENLKTLRLRLRRCHRFLPCENGGGSGGKSKAVEQVKNAFNKLQEKGIYKAMSEFDIFINYIEAYMTMKIRD

SEQ ID NO: 2159 - protein, 622 aa, synthetic construct
  REGION 1..622: note = Synthetic
QVQLVQSGAEVTKPGASVKVSCKASGYTFTRYDINWVRQATGQGLEWMGWMNPNSGNSGSVQKFRGRVTMTRDTSITTVYMELSSLRSDDTAVYYCARGGISSSWHWAFDIWGQGTMVTVSSASTKGPSVFPLAPSSKSTSGGTAALGCLVKDYFPEPVTVSWNSGALTSGVHTFPAVLQSSGLYSLSSVVTVPSSSLGTQTYICNVNHKPSNTKVDKKVEPKSCDKTHTCPPCPAPELLGGPSVFLFPPKPKDTLMISRTPEVTCVVVDVSHEDPEVKFNWYVDGVEVHNAKTKPCEEQYGSTYRCVSVLTVLHQDWLNGKEYKCKVSNKALPAPIEKTISKAKGQPREPQVYTLPPSREEMTKNQVSLTCLVKGFYPSDIAVEWESNGQPENNYKTTPPVLDSDGSFFLYSKLTVDKSRWQQGNVFSCSVMHEALHNHYTQKSLSLSPGGGGGSSPGQGTQSENSCTHFPGNLPNMLRDLRDAFSRVKTFFQMKDQLDNLLLKESLLEDFKGYLGCQALSEMIQFYLEEVMPQAENQDPDIKAHVNSLGENLKTLRLRLRRCHRFLPCENAGGSGGKSKAVEQVKNAFNKLQEKGIYKAMSEFDIFINYIEAYMTMKIRN

SEQ ID NO: 2160 - protein, 166 aa, synthetic construct
  REGION 1..166: note = Synthetic
SPGQGTQSENSCTHFPGNLPNMLRDLRDAFSRVKTFFQMKDQLDNLLLKESLLEDFKGYLGCQALSEMIQFYLEEVMPQAENQDPDIKAHVNSLGENLKTLRLRLRRCHRFLPCENAGGSGGKSKAVEQVKNAFNKLQEKGIYKAMSEFDIFINYIEAYMTMKIRN

SEQ ID NO: 2161 - protein, 622 aa, synthetic construct
  REGION 1..622: note = Synthetic
QVQLVQSGAEVTKPGASVKVSCKASGYTFTRYDINWVRQATGQGLEWMGWMNPNSGNSGSVQKFRGRVTMTRDTSITTVYMELSSLRSDDTAVYYCARGGISSSWHWAFDIWGQGTMVTVSSASTKGPSVFPLAPSSKSTSGGTAALGCLVKDYFPEPVTVSWNSGALTSGVHTFPAVLQSSGLYSLSSVVTVPSSSLGTQTYICNVNHKPSNTKVDKKVEPKSCDKTHTCPPCPAPELLGGPSVFLFPPKPKDTLMISRTPEVTCVVVDVSHEDPEVKFNWYVDGVEVHNAKTKPCEEQYGSTYRCVSVLTVLHQDWLNGKEYKCKVSNKALPAPIEKTISKAKGQPREPQVYTLPPSREEMTKNQVSLTCLVKGFYPSDIAVEWESNGQPENNYKTTPPVLDSDGSFFLYSKLTVDKSRWQQGNVFSCSVMHEALHNHYTQKSLSLSPGGGGGSSPGQGTQSENSCTHFPGNLPNMLRDLRDAFSRVKTFFQMKDQLDNLLLKESLLEDFKGYLGCQALSEMIQFYLEEVMPQAENQDPDIKAHVNSLGENLKTLRLRLRRCHRFLPCENVGGSGGKSKAVEQVKNAFNKLQEKGIYKAMSEFDIFINYIEAYMTMKIRN

SEQ ID NO: 2162 - protein, 166 aa, synthetic construct
  REGION 1..166: note = Synthetic
SPGQGTQSENSCTHFPGNLPNMLRDLRDAFSRVKTFFQMKDQLDNLLLKESLLEDFKGYLGCQALSEMIQFYLEEVMPQAENQDPDIKAHVNSLGENLKTLRLRLRRCHRFLPCENVGGSGGKSKAVEQVKNAFNKLQEKGIYKAMSEFDIFINYIEAYMTMKIRN

SEQ ID NO: 2163 - protein, 622 aa, synthetic construct
  REGION 1..622: note = Synthetic
QVQLVQSGAEVTKPGASVKVSCKASGYTFTRYDINWVRQATGQGLEWMGWMNPNSGNSGSVQKFRGRVTMTRDTSITTVYMELSSLRSDDTAVYYCARGGISSSWHWAFDIWGQGTMVTVSSASTKGPSVFPLAPSSKSTSGGTAALGCLVKDYFPEPVTVSWNSGALTSGVHTFPAVLQSSGLYSLSSVVTVPSSSLGTQTYICNVNHKPSNTKVDKKVEPKSCDKTHTCPPCPAPELLGGPSVFLFPPKPKDTLMISRTPEVTCVVVDVSHEDPEVKFNWYVDGVEVHNAKTKPCEEQYGSTYRCVSVLTVLHQDWLNGKEYKCKVSNKALPAPIEKTISKAKGQPREPQVYTLPPSREEMTKNQVSLTCLVKGFYPSDIAVEWESNGQPENNYKTTPPVLDSDGSFFLYSKLTVDKSRWQQGNVFSCSVMHEALHNHYTQKSLSLSPGGGGGSSPGQGTQSENSCTHFPGNLPNMLRDLRDAFSRVKTFFQMKDQLDNLLLKESLLEDFKGYLGCQALSEMIQFYLEEVMPQAENQDPDIKAHVNSLGENLKTLRLRLRRCHRFLPCENGGGSAGKSKAVEQVKNAFNKLQEKGIYKAMSEFDIFINYIEAYMTMKIRN

SEQ ID NO: 2164 - protein, 166 aa, synthetic construct
  REGION 1..166: note = Synthetic
SPGQGTQSENSCTHFPGNLPNMLRDLRDAFSRVKTFFQMKDQLDNLLLKESLLEDFKGYLGCQALSEMIQFYLEEVMPQAENQDPDIKAHVNSLGENLKTLRLRLRRCHRFLPCENGGGSAGKSKAVEQVKNAFNKLQEKGIYKAMSEFDIFINYIEAYMTMKIRN

SEQ ID NO: 2165 - protein, 622 aa, synthetic construct
  REGION 1..622: note = Synthetic
QVQLVQSGAEVTKPGASVKVSCKASGYTFTRYDINWVRQATGQGLEWMGWMNPNSGNSGSVQKFRGRVTMTRDTSITTVYMELSSLRSDDTAVYYCARGGISSSWHWAFDIWGQGTMVTVSSASTKGPSVFPLAPSSKSTSGGTAALGCLVKDYFPEPVTVSWNSGALTSGVHTFPAVLQSSGLYSLSSVVTVPSSSLGTQTYICNVNHKPSNTKVDKKVEPKSCDKTHTCPPCPAPELLGGPSVFLFPPKPKDTLMISRTPEVTCVVVDVSHEDPEVKFNWYVDGVEVHNAKTKPCEEQYGSTYRCVSVLTVLHQDWLNGKEYKCKVSNKALPAPIEKTISKAKGQPREPQVYTLPPSREEMTKNQVSLTCLVKGFYPSDIAVEWESNGQPENNYKTTPPVLDSDGSFFLYSKLTVDKSRWQQGNVFSCSVMHEALHNHYTQKSLSLSPGGGGGSSPGQGTQSENSCTHFPGNLPNMLRDLRDAFSRVKTFFQMKDQLDNLLLKESLLEDFKGYLGCQALSEMIQFYLEEVMPQAENQDPDIKPHVNSLGENLKTLRLRLRRCHRFLPCENGGGSGGKSKAVEQVKNAFNKLQEKGIYKAMSEFDIFINYIEAYMTMKIRN

SEQ ID NO: 2166 - protein, 166 aa, synthetic construct
  REGION 1..166: note = Synthetic
SPGQGTQSENSCTHFPGNLPNMLRDLRDAFSRVKTFFQMKDQLDNLLLKESLLEDFKGYLGCQALSEMIQFYLEEVMPQAENQDPDIKPHVNSLGENLKTLRLRLRRCHRFLPCENGGGSGGKSKAVEQVKNAFNKLQEKGIYKAMSEFDIFINYIEAYMTMKIRN

SEQ ID NO: 2167 - protein, 622 aa, synthetic construct
  REGION 1..622: note = Synthetic
QVQLVQSGAEVTKPGASVKVSCKASGYTFTRYDINWVRQATGQGLEWMGWMNPNSGNSGSVQKFRGRVTMTRDTSITTVYMELSSLRSDDTAVYYCARGGISSSWHWAFDIWGQGTMVTVSSASTKGPSVFPLAPSSKSTSGGTAALGCLVKDYFPEPVTVSWNSGALTSGVHTFPAVLQSSGLYSLSSVVTVPSSSLGTQTYICNVNHKPSNTKVDKKVEPKSCDKTHTCPPCPAPELLGGPSVFLFPPKPKDTLMISRTPEVTCVVVDVSHEDPEVKFNWYVDGVEVHNAKTKPCEEQYGSTYRCVSVLTVLHQDWLNGKEYKCKVSNKALPAPIEKTISKAKGQPREPQVYTLPPSREEMTKNQVSLTCLVKGFYPSDIAVEWESNGQPENNYKTTPPVLDSDGSFFLYSKLTVDKSRWQQGNVFSCSVMHEALHNHYTQKSLSLSPGGGGGSSPGQGTQSENSCTHFPGNLPNMLRDLRDAFSRVKTFFQMKDQLDNLLLKESLLEDFKGYLGCQALSEMIQFYLEEVMPQAENQDPDIKPHVNSLGENLKTLRLRLRRCHRFLPCENGGGSGGKSKAVEQVKNAFNKLQEKGIYDAMSEFDIFINYIEAYMTMKIRN

SEQ ID NO: 2168 - protein, 166 aa, synthetic construct
  REGION 1..166: note = Synthetic
SPGQGTQSENSCTHFPGNLPNMLRDLRDAFSRVKTFFQMKDQLDNLLLKESLLEDFKGYLGCQALSEMIQFYLEEVMPQAENQDPDIKPHVNSLGENLKTLRLRLRRCHRFLPCENGGGSGGKSKAVEQVKNAFNKLQEKGIYDAMSEFDIFINYIEAYMTMKIRN

SEQ ID NO: 2169 - protein, 622 aa, synthetic construct
  REGION 1..622: note = Synthetic
QVQLVQSGAEVTKPGASVKVSCKASGYTFTRYDINWVRQATGQGLEWMGWMNPNSGNSGSVQKFRGRVTMTRDTSITTVYMELSSLRSDDTAVYYCARGGISSSWHWAFDIWGQGTMVTVSSASTKGPSVFPLAPSSKSTSGGTAALGCLVKDYFPEPVTVSWNSGALTSGVHTFPAVLQSSGLYSLSSVVTVPSSSLGTQTYICNVNHKPSNTKVDKKVEPKSCDKTHTCPPCPAPELLGGPSVFLFPPKPKDTLMISRTPEVTCVVVDVSHEDPEVKFNWYVDGVEVHNAKTKPCEEQYGSTYRCVSVLTVLHQDWLNGKEYKCKVSNKALPAPIEKTISKAKGQPREPQVYTLPPSREEMTKNQVSLTCLVKGFYPSDIAVEWESNGQPENNYKTTPPVLDSDGSFFLYSKLTVDKSRWQQGNVFSCSVMHEALHNHYTQKSLSLSPGGGGGSSPGQGTQSENSCTHFPGNLPNMLRDLRDAFSRVKTFFQMKDQLDNLLLKESLLEDFKGYLGCQALSEMIQFYLEEVMPQAENQDPDIKAHVNSLGENLKTLRLRLRRCHRFLPCKNGGGSGGKSKAVEQVKNAFNKLQEKGIYKAMSEFDIFINYIEAYMTMKIRN

SEQ ID NO: 2170 - protein, 166 aa, synthetic construct
  REGION 1..166: note = Synthetic
SPGQGTQSENSCTHFPGNLPNMLRDLRDAFSRVKTFFQMKDQLDNLLLKESLLEDFKGYLGCQALSEMIQFYLEEVMPQAENQDPDIKAHVNSLGENLKTLRLRLRRCHRFLPCKNGGGSGGKSKAVEQVKNAFNKLQEKGIYKAMSEFDIFINYIEAYMTMKIRN

SEQ ID NO: 2171 - protein, 622 aa, synthetic construct
  REGION 1..622: note = Synthetic
QVQLVQSGAEVTKPGASVKVSCKASGYTFTRYDINWVRQATGQGLEWMGWMNPNSGNSGSVQKFRGRVTMTRDTSITTVYMELSSLRSDDTAVYYCARGGISSSWHWAFDIWGQGTMVTVSSASTKGPSVFPLAPSSKSTSGGTAALGCLVKDYFPEPVTVSWNSGALTSGVHTFPAVLQSSGLYSLSSVVTVPSSSLGTQTYICNVNHKPSNTKVDKKVEPKSCDKTHTCPPCPAPELLGGPSVFLFPPKPKDTLMISRTPEVTCVVVDVSHEDPEVKFNWYVDGVEVHNAKTKPCEEQYGSTYRCVSVLTVLHQDWLNGKEYKCKVSNKALPAPIEKTISKAKGQPREPQVYTLPPSREEMTKNQVSLTCLVKGFYPSDIAVEWESNGQPENNYKTTPPVLDSDGSFFLYSKLTVDKSRWQQGNVFSCSVMHEALHNHYTQKSLSLSPGGGGGSSPGQGTQSENSCTHFPGNLPNMLRDLRDAFSRVKTFFQMKDQLDNLLLKESLLEDFKGYLGCQALSEMIQFYLEEVMPQAENQDPDIKAHVNSLGENLKTLRLRLRRCHRFLPCKNGGGSGGKSKAVEQVKNAFNKLQEKGIYDAMSEFDIFINYIEAYMTMKIRN

SEQ ID NO: 2172 - protein, 166 aa, synthetic construct
  REGION 1..166: note = Synthetic
SPGQGTQSENSCTHFPGNLPNMLRDLRDAFSRVKTFFQMKDQLDNLLLKESLLEDFKGYLGCQALSEMIQFYLEEVMPQAENQDPDIKAHVNSLGENLKTLRLRLRRCHRFLPCKNGGGSGGKSKAVEQVKNAFNKLQEKGIYDAMSEFDIFINYIEAYMTMKIRN

SEQ ID NO: 2173 - protein, 622 aa, synthetic construct
  REGION 1..622: note = Synthetic
QVQLVQSGAEVTKPGASVKVSCKASGYTFTRYDINWVRQATGQGLEWMGWMNPNSGNSGSVQKFRGRVTMTRDTSITTVYMELSSLRSDDTAVYYCARGGISSSWHWAFDIWGQGTMVTVSSASTKGPSVFPLAPSSKSTSGGTAALGCLVKDYFPEPVTVSWNSGALTSGVHTFPAVLQSSGLYSLSSVVTVPSSSLGTQTYICNVNHKPSNTKVDKKVEPKSCDKTHTCPPCPAPELLGGPSVFLFPPKPKDTLMISRTPEVTCVVVDVSHEDPEVKFNWYVDGVEVHNAKTKPCEEQYGSTYRCVSVLTVLHQDWLNGKEYKCKVSNKALPAPIEKTISKAKGQPREPQVYTLPPSREEMTKNQVSLTCLVKGFYPSDIAVEWESNGQPENNYKTTPPVLDSDGSFFLYSKLTVDKSRWQQGNVFSCSVMHEALHNHYTQKSLSLSPGGGGGSSPGQGTQSENSCTHFPGNLPNMLRDLRDAFSRVKTFFQMKDQLDNLLLKESLLEDYKGYLGCQALSEMIQFYLEEVMPQAENQDPDIKAHVNSLGENLKTLRLRLRRCHRFLPCENGGGSGGKSKAVEQVKNAFNKLQEKGIYKAMSEFDIFINYIEAYMTMKIRN

SEQ ID NO: 2174 - protein, 166 aa, synthetic construct
  REGION 1..166: note = Synthetic
SPGQGTQSENSCTHFPGNLPNMLRDLRDAFSRVKTFFQMKDQLDNLLLKESLLEDYKGYLGCQALSEMIQFYLEEVMPQAENQDPDIKAHVNSLGENLKTLRLRLRRCHRFLPCENGGGSGGKSKAVEQVKNAFNKLQEKGIYKAMSEFDIFINYIEAYMTMKIRN

SEQ ID NO: 2175 - protein, 622 aa, synthetic construct
  REGION 1..622: note = Synthetic
QVQLVQSGAEVTKPGASVKVSCKASGYTFTRYDINWVRQATGQGLEWMGWMNPNSGNSGSVQKFRGRVTMTRDTSITTVYMELSSLRSDDTAVYYCARGGISSSWHWAFDIWGQGTMVTVSSASTKGPSVFPLAPSSKSTSGGTAALGCLVKDYFPEPVTVSWNSGALTSGVHTFPAVLQSSGLYSLSSVVTVPSSSLGTQTYICNVNHKPSNTKVDKKVEPKSCDKTHTCPPCPAPELLGGPSVFLFPPKPKDTLMISRTPEVTCVVVDVSHEDPEVKFNWYVDGVEVHNAKTKPCEEQYGSTYRCVSVLTVLHQDWLNGKEYKCKVSNKALPAPIEKTISKAKGQPREPQVYTLPPSREEMTKNQVSLTCLVKGFYPSDIAVEWESNGQPENNYKTTPPVLDSDGSFFLYSKLTVDKSRWQQGNVFSCSVMHEALHNHYTQKSLSLSPGGGGGSSPGQGTQSENSCTHFPGNLPNMLRDLRDAFSRVKTFFQMKDQLDNLLLKESLLEDYKGYLGCQALSEMIQFYLEEVMPQAENQDPDIKAHVNSLGENLKTLRLRLRRCHRFLPCENGGGSGGKSKAVEQVKNAFNKLQEKGIYDAMSEFDIFINYIEAYMTMKIRN

SEQ ID NO: 2176 - protein, 166 aa, synthetic construct
  REGION 1..166: note = Synthetic
SPGQGTQSENSCTHFPGNLPNMLRDLRDAFSRVKTFFQMKDQLDNLLLKESLLEDYKGYLGCQALSEMIQFYLEEVMPQAENQDPDIKAHVNSLGENLKTLRLRLRRCHRFLPCENGGGSGGKSKAVEQVKNAFNKLQEKGIYDAMSEFDIFINYIEAYMTMKIRN

SEQ ID NO: 2177 - protein, 622 aa, synthetic construct
  REGION 1..622: note = Synthetic
QVQLVQSGAEVTKPGASVKVSCKASGYTFTRYDINWVRQATGQGLEWMGWMNPNSGNSGSVQKFRGRVTMTRDTSITTVYMELSSLRSDDTAVYYCARGGISSSWHWAFDIWGQGTMVTVSSASTKGPSVFPLAPSSKSTSGGTAALGCLVKDYFPEPVTVSWNSGALTSGVHTFPAVLQSSGLYSLSSVVTVPSSSLGTQTYICNVNHKPSNTKVDKKVEPKSCDKTHTCPPCPAPELLGGPSVFLFPPKPKDTLMISRTPEVTCVVVDVSHEDPEVKFNWYVDGVEVHNAKTKPCEEQYGSTYRCVSVLTVLHQDWLNGKEYKCKVSNKALPAPIEKTISKAKGQPREPQVYTLPPSREEMTKNQVSLTCLVKGFYPSDIAVEWESNGQPENNYKTTPPVLDSDGSFFLYSKLTVDKSRWQQGNVFSCSVMHEALHNHYTQKSLSLSPGGGGGSSPGQGTQSENSCTHFPGNLPNMLRDLRDAFSRVKTFFQMKDQLDNLLLKESLLEDFKGYLGCQALSEMIQFYLEEVMPQAENQDPDIKAHVNSLGENLKTLRLRLRRCDRFLPCENGGGSGGKSKAVEQVKNAFNKLQEKGIYKAMSEFDIFINYIEAYMTMKIRN

SEQ ID NO: 2178 - protein, 166 aa, synthetic construct
  REGION 1..166: note = Synthetic
SPGQGTQSENSCTHFPGNLPNMLRDLRDAFSRVKTFFQMKDQLDNLLLKESLLEDFKGYLGCQALSEMIQFYLEEVMPQAENQDPDIKAHVNSLGENLKTLRLRLRRCDRFLPCENGGGSGGKSKAVEQVKNAFNKLQEKGIYKAMSEFDIFINYIEAYMTMKIRN

SEQ ID NO: 2179 - protein, 622 aa, synthetic construct
  REGION 1..622: note = Synthetic
QVQLVQSGAEVTKPGASVKVSCKASGYTFTRYDINWVRQATGQGLEWMGWMNPNSGNSGSVQKFRGRVTMTRDTSITTVYMELSSLRSDDTAVYYCARGGISSSWHWAFDIWGQGTMVTVSSASTKGPSVFPLAPSSKSTSGGTAALGCLVKDYFPEPVTVSWNSGALTSGVHTFPAVLQSSGLYSLSSVVTVPSSSLGTQTYICNVNHKPSNTKVDKKVEPKSCDKTHTCPPCPAPELLGGPSVFLFPPKPKDTLMISRTPEVTCVVVDVSHEDPEVKFNWYVDGVEVHNAKTKPCEEQYGSTYRCVSVLTVLHQDWLNGKEYKCKVSNKALPAPIEKTISKAKGQPREPQVYTLPPSREEMTKNQVSLTCLVKGFYPSDIAVEWESNGQPENNYKTTPPVLDSDGSFFLYSKLTVDKSRWQQGNVFSCSVMHEALHNHYTQKSLSLSPGGGGGSSPGQGTQSENSCTHFPGNLPNMLRDLRDAFSRVKTFFQMKDQLDNLLLKESLLEDFKGYLGCQALSEMIQFYLEEVMPQAENQDPDIKAHVNSLGENLKTLRLRLRRCDRFLPCENGGGSGGKSKAVEQVKNAFNKLQEKGIYDAMSEFDIFINYIEAYMTMKIRN

SEQ ID NO: 2180 - protein, 166 aa, synthetic construct
  REGION 1..166: note = Synthetic
SPGQGTQSENSCTHFPGNLPNMLRDLRDAFSRVKTFFQMKDQLDNLLLKESLLEDFKGYLGCQALSEMIQFYLEEVMPQAENQDPDIKAHVNSLGENLKTLRLRLRRCDRFLPCENGGGSGGKSKAVEQVKNAFNKLQEKGIYDAMSEFDIFINYIEAYMTMKIRN

SEQ ID NO: 2181 - protein, 622 aa, synthetic construct
  REGION 1..622: note = Synthetic
QVQLVQSGAEVTKPGASVKVSCKASGYTFTRYDINWVRQATGQGLEWMGWMNPNSGNSGSVQKFRGRVTMTRDTSITTVYMELSSLRSDDTAVYYCARGGISSSWHWAFDIWGQGTMVTVSSASTKGPSVFPLAPSSKSTSGGTAALGCLVKDYFPEPVTVSWNSGALTSGVHTFPAVLQSSGLYSLSSVVTVPSSSLGTQTYICNVNHKPSNTKVDKKVEPKSCDKTHTCPPCPAPELLGGPSVFLFPPKPKDTLMISRTPEVTCVVVDVSHEDPEVKFNWYVDGVEVHNAKTKPCEEQYGSTYRCVSVLTVLHQDWLNGKEYKCKVSNKALPAPIEKTISKAKGQPREPQVYTLPPSREEMTKNQVSLTCLVKGFYPSDIAVEWESNGQPENNYKTTPPVLDSDGSFFLYSKLTVDKSRWQQGNVFSCSVMHEALHNHYTQKSLSLSPGGGGGSSPGQGTQSENSCTQFPGNLPNMLRDLRDAFSRVKTFFQMKDQLDNKLLKESLLEDFKGYLGCQALSEMIQFYLEEVMPQAENQDPDIKAHVNSLGENLKTLRLRLRRCHRFLPCENGGGSGGKSKAVEQVKNAFNKLQEKGIYKAMSEFDIFINYIEAYMTMKIRN

SEQ ID NO: 2182 - protein, 166 aa, synthetic construct
  REGION 1..166: note = Synthetic
SPGQGTQSENSCTQFPGNLPNMLRDLRDAFSRVKTFFQMKDQLDNKLLKESLLEDFKGYLGCQALSEMIQFYLEEVMPQAENQDPDIKAHVNSLGENLKTLRLRLRRCHRFLPCENGGGSGGKSKAVEQVKNAFNKLQEKGIYKAMSEFDIFINYIEAYMTMKIRN

SEQ ID NO: 2183 - DNA, 639 bp, synthetic construct
  misc_feature 1..639: note = Synthetic
  source 1..639: mol_type = other DNA
tcctatgagctgactcagtcaccctcagtgtccgtgtccccaggacagacagccagcatcacctgctctggagatcaattggggtataaatatgcttgctggtatcagcagaagccaggccagtcccctgtgctggtcatctatcaagatagcaggcgaccctcagggatccctgagcgattctctggctccaactctgggaacacagccactctgaccatcagcgggacccaggctatggatgaggctgtctatttctgtcaggcgtgggacagcaccactgtggtattcggcggagggaccaaactgaccgtcctaagtcagcccaaggctgcaccctcggtcactctgttcccgccctcctctgaggagcttcaagccaacaaggccacactggtgtgtctcatcagtgacttctacccgggagccgtgacagtggcctggaaggcagatagcagccccgtcaaggcgggagtggaaaccaccacaccctccaaacaaagcaacaacaagtacgcggccagcagctatctgagcctgacgcctgagcagtggaagtcccacagaagctacagctgccaggtcacgcatgaagggagcaccgtggagaagacagtggcccctacagaatgttcatag

SEQ ID NO: 2184 - DNA, 1356 bp, synthetic construct
  misc_feature 1..1356: note = Synthetic
  source 1..1356: mol_type = other DNA
caggtgcagctgcaggcgtcgggcccaggactgatgaagccttcacagaccctgtccctcacctgcactgtctctggtggctccatcagcagtggtgtttactactggagctggatccgccagaacccagggaagggcctggagtggattggatacatctattacagtgggaccacttactacaatccgtccctcaagagtcgagttaccatctcaatcgacacgtctaagaaccagttctccctgaagctgagctctgtgactgccgcggacacggccgtgtattactgtgcgaggggagtgaccacggtggtccctgatgcttttgatatctggggccaagggacaatggtcaccgtgtcttcagcctccaccaagggcccatcggtcttccccctggcaccctcctccaagagcacctctgggggcacagcggccctgggctgcctggtcaaggactacttccccgaaccggtgacggtgtcgtggaactcaggcgccctgaccagcggcgtgcacaccttcccggctgtcctacagtcctcaggactctactccctcagcagcgtggtgaccgtgccctccagcagcttgggcacccagacctacatctgcaacgtgaatcacaagcccagcaacaccaaggtggacaagaaagttgagcccaaatcttgtgacaaaactcacacatgcccaccgtgcccagcacctgaactcctggggggaccgtcagtcttcctcttccccccaaaacccaaggacaccctcatgatctcccggacccctgaggtcacatgcgtggtggtggacgtgagccacgaagaccctgaggtcaagttcaactggtacgtggacggcgtggaggtgcataatgccaagacaaagccgtgcgaggagcagtacggcagcacgtaccgttgcgtcagcgtcctcaccgtcctgcaccaggactggctgaatggcaaggagtacaagtgcaaggtgtccaacaaagccctcccagcccccatcgagaaaaccatctccaaagccaaagggcagccccgagaaccacaggtgtacaccctgcccccatcccgggaggagatgaccaagaaccaggtcagcctgacctgcctggtcaaaggcttctatcccagcgacatcgccgtggagtgggagagcaatgggcagccggagaacaactacaagaccacgcctcccgtgctggactccgacggctccttcttcctctatagcaagctcaccgtggacaagagcaggtggcagcaggggaacgtcttctcatgctccgtgatgcatgaggctctgcacaaccactacacgcagaagagcctctccctgtctccgggctag

SEQ ID NO: 2185 - protein, 212 aa, synthetic construct
  REGION 1..212: note = Synthetic
SYELTQSPSVSVSPGQTASITCSGDQLGYKYACWYQQKPGQSPVLVIYQDSRRPSGIPERFSGSNSGNTATLTISGTQAMDEAVYFCQAWDSTTVVFGGGTKLTVLSQPKAAPSVTLFPPSSEELQANKATLVCLISDFYPGAVTVAWKADSSPVKAGVETTTPSKQSNNKYAASSYLSLTPEQWKSHRSYSCQVTHEGSTVEKTVAPTECS

SEQ ID NO: 2186 - protein, 451 aa, synthetic construct
  REGION 1..451: note = Synthetic
QVQLQASGPGLMKPSQTLSLTCTVSGGSISSGVYYWSWIRQNPGKGLEWIGYIYYSGTTYYNPSLKSRVTISIDTSKNQFSLKLSSVTAADTAVYYCARGVTTVVPDAFDIWGQGTMVTVSSASTKGPSVFPLAPSSKSTSGGTAALGCLVKDYFPEPVTVSWNSGALTSGVHTFPAVLQSSGLYSLSSVVTVPSSSLGTQTYICNVNHKPSNTKVDKKVEPKSCDKTHTCPPCPAPELLGGPSVFLFPPKPKDTLMISRTPEVTCVVVDVSHEDPEVKFNWYVDGVEVHNAKTKPCEEQYGSTYRCVSVLTVLHQDWLNGKEYKCKVSNKALPAPIEKTISKAKGQPREPQVYTLPPSREEMTKNQVSLTCLVKGFYPSDIAVEWESNGQPENNYKTTPPVLDSDGSFFLYSKLTVDKSRWQQGNVFSCSVMHEALHNHYTQKSLSLSPG

SEQ ID NO: 2187-2189 - skipped (3 entries)

SEQ ID NO: 2190 - protein, 11 aa, synthetic construct
  REGION 1..11: note = Synthetic
SGDQLGYKYAS

SEQ ID NO: 2191 - protein, 7 aa, synthetic construct
  REGION 1..7: note = Synthetic
QDSRRPS

SEQ ID NO: 2192 - protein, 9 aa, synthetic construct
  REGION 1..9: note = Synthetic
QAWDSTTVV

SEQ ID NO: 2193-2195 - skipped (3 entries)

SEQ ID NO: 2196 - protein, 7 aa, synthetic construct
  REGION 1..7: note = Synthetic
SGVYYWS

SEQ ID NO: 2197 - protein, 16 aa, synthetic construct
  REGION 1..16: note = Synthetic
YIYYSGTTYYNPSLKS

SEQ ID NO: 2198 - protein, 12 aa, synthetic construct
  REGION 1..12: note = Synthetic
GVTTVVPDAFDI

SEQ ID NO: 2199 - protein, 11 aa, synthetic construct
  REGION 1..11: note = Synthetic
  VARIANT 1: note = Xaa is R or Q
  VARIANT 6: note = Xaa is V or I
  VARIANT 7: note = Xaa is N or S
  VARIANT 8: note = Xaa is S, H, I, V or A
XASQSXXXNLA

SEQ ID NO: 2200 - protein, 7 aa, synthetic construct
  REGION 1..7: note = Synthetic
  VARIANT 3: note = Xaa is S or Y
  VARIANT 4: note = Xaa is T or I
GAXXRAT

SEQ ID NO: 2201-2203 - skipped (3 entries)

SEQ ID NO: 2204 - protein, 11 aa, synthetic construct
  REGION 1..11: note = Synthetic
  VARIANT 4: note = Xaa is R or Q
  VARIANT 7: note = Xaa is R, S, N, or F
  VARIANT 8: note = Xaa is K or N
  VARIANT 9: note = Xaa is H, Y, or D
QASXDIXXXLN

SEQ ID NO: 2205 - protein, 17 aa, synthetic construct
  REGION 1..17: note = Synthetic
  VARIANT 1: note = Xaa is T, E, or S
  VARIANT 2: note = Xaa is absent or M, V or I
  VARIANT 3: note = Xaa is S, R, or K
  VARIANT 4: note = Xaa is G or Q
  VARIANT 5: note = Xaa is S, D or H
  VARIANT 6: note = Xaa is G, S, L, or A
  VARIANT 7: note = Xaa is S, G, or R
  VARIANT 8: note = Xaa is T, S, P, or E
  VARIANT 9: note = Xaa is T or I
  VARIANT 12: note = Xaa is A or V
  VARIANT 13: note = Xaa is D or E
  VARIANT 14: note = Xaa is S or A
XXXXXXXXXYYXXXVKG

SEQ ID NO: 2206 - skipped

SEQ ID NO: 2207 - protein, 9 aa, synthetic construct
  REGION 1..9: note = Synthetic
  VARIANT 2: note = Xaa is Q or H
  VARIANT 4: note = Xaa is D, A, or G
  VARIANT 5: note = Xaa is N or K
  VARIANT 6: note = Xaa is L or I
  VARIANT 8: note = Xaa is I or L
QXYXXXPXT

SEQ ID NO: 2208 - protein, 5 aa, synthetic construct
  REGION 1..5: note = Synthetic
  VARIANT 1: note = Xaa is R or S
XYDIN

SEQ ID NO: 2209 - protein, 17 aa, synthetic construct
  REGION 1..17: note = Synthetic
  VARIANT 1: note = Xaa is W or R
  VARIANT 2: note = Xaa is M or L
  VARIANT 5: note = Xaa is N, Q, or K
  VARIANT 6: note = Xaa is S, A, or R
  VARIANT 8: note = Xaa is N or Q
  VARIANT 9: note = Xaa is S, A, or T
  VARIANT 11: note = Xaa is S, Q, or Y
  VARIANT 12: note = Xaa is V or T
  VARIANT 13: note = Xaa is Q or K
  VARIANT 14: note = Xaa is K or N
  VARIANT 16: note = Xaa is R or Q
  VARIANT 17: note = Xaa is G or I
XXNPXXGXXGXXXXFXX

SEQ ID NO: 2210 - skipped

SEQ ID NO: 2211 - protein, 166 aa, synthetic construct
  REGION 1..166: note = Synthetic
SPGQGTQSENSCTHFPGNLPNMLRDLRDAFSRVKTFFQMKDQLDNLLLKESLLEDFKGYLGCQALSEMIQFYLEEVMPQAENQDPDIKAHVNSLGENLKTLRLRLRRCHRFLPCENGGGSGGKSKAVEQVKNAFNKLQEKGIYKAMSEFDIFINYIEAYMTMKIRN

SEQ ID NO: 2212 - protein, 11 aa, synthetic construct
  REGION 1..11: note = Synthetic
RASQSVNSNLA

SEQ ID NO: 2213 - protein, 11 aa, synthetic construct
  REGION 1..11: note = Synthetic
QASQDIRKHLN

SEQ ID NO: 2214 - protein, 11 aa, synthetic construct
  REGION 1..11: note = Synthetic
RASQDISSNLN

SEQ ID NO: 2215 - protein, 9 aa, synthetic construct
  REGION 1..9: note = Synthetic
QASQDIHLN

SEQ ID NO: 2216 - protein, 11 aa, synthetic construct
  REGION 1..11: note = Synthetic
RASQGIRKWLA

SEQ ID NO: 2217 - protein, 11 aa, synthetic construct
  REGION 1..11: note = Synthetic
RASQSVNSNLA

SEQ ID NO: 2218 - protein, 10 aa, synthetic construct
  REGION 1..10: note = Synthetic
SGDKLGERVS

SEQ ID NO: 2219 - protein, 7 aa, synthetic construct
  REGION 1..7: note = Synthetic
GASTRAT

SEQ ID NO: 2220 - protein, 7 aa, synthetic construct
  REGION 1..7: note = Synthetic
DASNLET

SEQ ID NO: 2221 - protein, 7 aa, synthetic construct
  REGION 1..7: note = Synthetic
AASRLQS

SEQ ID NO: 2222 - protein, 9 aa, synthetic construct
  REGION 1..9: note = Synthetic
QQFKNWPPT

SEQ ID NO: 2223 - protein, 9 aa, synthetic construct
  REGION 1..9: note = Synthetic
QHYDNLPIT

SEQ ID NO: 2224 - protein, 9 aa, synthetic construct
  REGION 1..9: note = Synthetic
LQAHGFPWT

SEQ ID NO: 2225 - protein, 9 aa, synthetic construct
  REGION 1..9: note = Synthetic
QQYDNLPLT

SEQ ID NO: 2226 - protein, 7 aa, synthetic construct
  REGION 1..7: note = Synthetic
QFWPPWT

SEQ ID NO: 2227 - protein, 5 aa, synthetic construct
  REGION 1..5: note = Synthetic
AYAMS

SEQ ID NO: 2228 - protein, 5 aa, synthetic construct
  REGION 1..5: note = Synthetic
RYDIN

SEQ ID NO: 2229 - protein, 5 aa, synthetic construct
  REGION 1..5: note = Synthetic
SYWMS

SEQ ID NO: 2230 - protein, 16 aa, synthetic construct
  REGION 1..16: note = Synthetic
TSGSGSTTYYADSVKG

SEQ ID NO: 2231 - protein, 16 aa, synthetic construct
  REGION 1..16: note = Synthetic
WMNPNSGNSSVQKFRG

SEQ ID NO: 2232 - protein, 17 aa, synthetic construct
  REGION 1..17: note = Synthetic
NIKQDGSEEYYVDSVKG

SEQ ID NO: 2233 - protein, 215 aa, synthetic construct
  REGION 1..215: note = Synthetic
EIVMTQSPATLSVSPGERATLSCRASQSINANLAWYQQKPGQAPRLLIYGAYTRATGIPDRFSGSGSGTEFTLTISSLQSEDFAVYYCQEFIMWPPWTFGQGTKVEIKRTVAAPSVFIFPPSDEQLKSGTASVVCLLNNFYPREAKVQWKVDNALQSGNSQESVTEQDSKDSTYSLSSTLTLSKADYEKHKVYACEVTHQGLSSPVTKSFNRGEC

SEQ ID NO: 2234 - DNA, 714 bp, synthetic construct
  misc_feature 1..714: note = Synthetic
  source 1..714: mol_type = other DNA
atggacatgagggtgcccgctcagctcctggggctcctgctgctgtggctgagaggtgcgcgctgtgaaatcgtgatgacgcagtctccagccaccctgtctgtgtctccaggggaaagagccaccctctcctgcagggccagtcagagtattaacgctaacttagcctggtaccagcagaaacctggccaggctcccaggctcctcatctatggtgcatataccagggccactggtatcccagacaggttcagtggcagtgggtctgggacagagttcactctcaccatcagcagcctgcagtctgaagattttgcagtttattactgtcaggagtttattatgtggcctccgtggacgttcggccaggggaccaaggtggaaatcaaacgaacggtggctgcaccatctgtcttcatcttcccgccatctgatgagcagttgaaatctggaactgcctctgttgtgtgcctgctgaataacttctatcccagagaggccaaagtacagtggaaggtggataacgccctccaatcgggtaactcccaggagagtgtcacagagcaggacagcaaggacagcacctacagcctcagcagcaccctgacgctgagcaaagcagactacgagaaacacaaagtctacgcctgcgaagtcacccatcagggcctgagctcgcccgtcacaaagagcttcaacaggggagagtgttag

SEQ ID NO: 2235 - protein, 215 aa, synthetic construct
  REGION 1..215: note = Synthetic
EIVMTQSPATLSVSPGERATLSCRASQSININLAWYQQKPGQAPRLLIYGAYTRATGIPDRFSGSGSGTEFTLTISSLQSEDFAVYYCQEFIMWPPWTFGQGTKVEIKRTVAAPSVFIFPPSDEQLKSGTASVVCLLNNFYPREAKVQWKVDNALQSGNSQESVTEQDSKDSTYSLSSTLTLSKADYEKHKVYACEVTHQGLSSPVTKSFNRGEC

SEQ ID NO: 2236 - DNA, 714 bp, synthetic construct
  misc_feature 1..714: note = Synthetic
  source 1..714: mol_type = other DNA
atggacatgagggtgcccgctcagctcctggggctcctgctgctgtggctgagaggtgcgcgctgtgaaatcgtgatgacgcagtctccagccaccctgtctgtgtctccaggggaaagagccaccctctcctgcagggccagtcagagtattaacattaacttagcctggtaccagcagaaacctggccaggctcccaggctcctcatctatggtgcatataccagggccactggtatcccagacaggttcagtggcagtgggtctgggacagagttcactctcaccatcagcagcctgcagtctgaagattttgcagtttattactgtcaggagtttattatgtggcctccgtggacgttcggccaggggaccaaggtggaaatcaaacgaacggtggctgcaccatctgtcttcatcttcccgccatctgatgagcagttgaaatctggaactgcctctgttgtgtgcctgctgaataacttctatcccagagaggccaaagtacagtggaaggtggataacgccctccaatcgggtaactcccaggagagtgtcacagagcaggacagcaaggacagcacctacagcctcagcagcaccctgacgctgagcaaagcagactacgagaaacacaaagtctacgcctgcgaagtcacccatcagggcctgagctcgcccgtcacaaagagcttcaacaggggagagtgttag

SEQ ID NO: 2237 - protein, 215 aa, synthetic construct
  REGION 1..215: note = Synthetic
EIVMTQSPATLSVSPGERATLSCRASQSINHNLAWYQQKPGQAPRLLIYGAYTRATGIPDRFSGSGSGTEFTLTISSLQSEDFAVYYCQEFIMWPPWTFGQGTKVEIKRTVAAPSVFIFPPSDEQLKSGTASVVCLLNNFYPREAKVQWKVDNALQSGNSQESVTEQDSKDSTYSLSSTLTLSKADYEKHKVYACEVTHQGLSSPVTKSFNRGEC

SEQ ID NO: 2238 - DNA, 714 bp, synthetic construct
  misc_feature 1..714: note = Synthetic
  source 1..714: mol_type = other DNA
atggacatgagggtgcccgctcagctcctggggctcctgctgctgtggctgagaggtgcgcgctgtgaaatcgtgatgacgcagtctccagccaccctgtctgtgtctccaggggaaagagccaccctctcctgcagggccagtcagagtattaaccataacttagcctggtaccagcagaaacctggccaggctcccaggctcctcatctatggtgcatataccagggccactggtatcccagacaggttcagtggcagtgggtctgggacagagttcactctcaccatcagcagcctgcagtctgaagattttgcagtttattactgtcaggagtttattatgtggcctccgtggacgttcggccaggggaccaaggtggaaatcaaacgaacggtggctgcaccatctgtcttcatcttcccgccatctgatgagcagttgaaatctggaactgcctctgttgtgtgcctgctgaataacttctatcccagagaggccaaagtacagtggaaggtggataacgccctccaatcgggtaactcccaggagagtgtcacagagcaggacagcaaggacagcacctacagcctcagcagcaccctgacgctgagcaaagcagactacgagaaacacaaagtctacgcctgcgaagtcacccatcagggcctgagctcgcccgtcacaaagagcttcaacaggggagagtgttag

SEQ ID NO: 2239 - protein, 215 aa, synthetic construct
  REGION 1..215: note = Synthetic
EIVMTQSPATLSVSPGERATLSCRASQSINVNLAWYQQKPGQAPRLLIYGAYTRATGIPDRFSGSGSGTEFTLTISSLQSEDFAVYYCQEFIMWPPWTFGQGTKVEIKRTVAAPSVFIFPPSDEQLKSGTASVVCLLNNFYPREAKVQWKVDNALQSGNSQESVTEQDSKDSTYSLSSTLTLSKADYEKHKVYACEVTHQGLSSPVTKSFNRGEC

SEQ ID NO: 2240 - DNA, 714 bp, synthetic construct
  misc_feature 1..714: note = Synthetic
  source 1..714: mol_type = other DNA
atggacatgagggtgcccgctcagctcctggggctcctgctgctgtggctgagaggtgcgcgctgtgaaatcgtgatgacgcagtctccagccaccctgtctgtgtctccaggggaaagagccaccctctcctgcagggccagtcagagtattaacgttaacttagcctggtaccagcagaaacctggccaggctcccaggctcctcatctatggtgcatataccagggccactggtatcccagacaggttcagtggcagtgggtctgggacagagttcactctcaccatcagcagcctgcagtctgaagattttgcagtttattactgtcaggagtttattatgtggcctccgtggacgttcggccaggggaccaaggtggaaatcaaacgaacggtggctgcaccatctgtcttcatcttcccgccatctgatgagcagttgaaatctggaactgcctctgttgtgtgcctgctgaataacttctatcccagagaggccaaagtacagtggaaggtggataacgccctccaatcgggtaactcccaggagagtgtcacagagcaggacagcaaggacagcacctacagcctcagcagcaccctgacgctgagcaaagcagactacgagaaacacaaagtctacgcctgcgaagtcacccatcagggcctgagctcgcccgtcacaaagagcttcaacaggggagagtgttag

SEQ ID NO: 2241 - protein, 215 aa, synthetic construct
  REGION 1..215: note = Synthetic
EIVMTQSPATLSVSPGERATLSCRASQSINSNLAWYQQKPGQAPRLLIYGAYTRATGIPDRFSGSGSGTEFTLTISSLQSEDFAVYYCQEFIIWPPWTFGQGTKVEIKRTVAAPSVFIFPPSDEQLKSGTASVVCLLNNFYPREAKVQWKVDNALQSGNSQESVTEQDSKDSTYSLSSTLTLSKADYEKHKVYACEVTHQGLSSPVTKSFNRGEC

SEQ ID NO: 2242 - DNA, 714 bp, synthetic construct
  misc_feature 1..714: note = Synthetic
  source 1..714: mol_type = other DNA
atggacatgagggtgcccgctcagctcctggggctcctgctgctgtggctgagaggtgcgcgctgtgaaatcgtgatgacgcagtctccagccaccctgtctgtgtctccaggggaaagagccaccctctcctgcagggccagtcagagtattaacagcaacttagcctggtaccagcagaaacctggccaggctcccaggctcctcatctatggtgcatataccagggccactggtatcccagacaggttcagtggcagtgggtctgggacagagttcactctcaccatcagcagcctgcagtctgaagattttgcagtttattactgtcaggagtttattatttggcctccgtggacgttcggccaggggaccaaggtggaaatcaaacgaacggtggctgcaccatctgtcttcatcttcccgccatctgatgagcagttgaaatctggaactgcctctgttgtgtgcctgctgaataacttctatcccagagaggccaaagtacagtggaaggtggataacgccctccaatcgggtaactcccaggagagtgtcacagagcaggacagcaaggacagcacctacagcctcagcagcaccctgacgctgagcaaagcagactacgagaaacacaaagtctacgcctgcgaagtcacccatcagggcctgagctcgcccgtcacaaagagcttcaacaggggagagtgttag

SEQ ID NO: 2243 - protein, 215 aa, synthetic construct
  REGION 1..215: note = Synthetic
EIVMTQSPATLSVSPGERATLSCRASQSINSNLAWYQQKPGQAPRLLIYGAYTRATGIPDRFSGSGSGTEFTLTISSLQSEDFAVYYCQEFILWPPWTFGQGTKVEIKRTVAAPSVFIFPPSDEQLKSGTASVVCLLNNFYPREAKVQWKVDNALQSGNSQESVTEQDSKDSTYSLSSTLTLSKADYEKHKVYACEVTHQGLSSPVTKSFNRGEC

SEQ ID NO: 2244 - DNA, 714 bp, synthetic construct
  misc_feature 1..714: note = Synthetic
  source 1..714: mol_type = other DNA
atggacatgagggtgcccgctcagctcctggggctcctgctgctgtggctgagaggtgcgcgctgtgaaatcgtgatgacgcagtctccagccaccctgtctgtgtctccaggggaaagagccaccctctcctgcagggccagtcagagtattaacagcaacttagcctggtaccagcagaaacctggccaggctcccaggctcctcatctatggtgcatataccagggccactggtatcccagacaggttcagtggcagtgggtctgggacagagttcactctcaccatcagcagcctgcagtctgaagattttgcagtttattactgtcaggagtttattctttggcctccgtggacgttcggccaggggaccaaggtggaaatcaaacgaacggtggctgcaccatctgtcttcatcttcccgccatctgatgagcagttgaaatctggaactgcctctgttgtgtgcctgctgaataacttctatcccagagaggccaaagtacagtggaaggtggataacgccctccaatcgggtaactcccaggagagtgtcacagagcaggacagcaaggacagcacctacagcctcagcagcaccctgacgctgagcaaagcagactacgagaaacacaaagtctacgcctgcgaagtcacccatcagggcctgagctcgcccgtcacaaagagcttcaacaggggagagtgttag

SEQ ID NO: 2245 - protein, 215 aa, synthetic construct
  REGION 1..215: note = Synthetic
EIVMTQSPATLSVSPGERATLSCRASQSINSNLAWYQQKPGQAPRLLIYGAYTRATGIPDRFSGSGSGTEFTLTISSLQSEDFAVYYCQEFIMFPPWTFGQGTKVEIKRTVAAPSVFIFPPSDEQLKSGTASVVCLLNNFYPREAKVQWKVDNALQSGNSQESVTEQDSKDSTYSLSSTLTLSKADYEKHKVYACEVTHQGLSSPVTKSFNRGEC

SEQ ID NO: 2246 - DNA, 714 bp, synthetic construct
  misc_feature 1..714: note = Synthetic
  source 1..714: mol_type = other DNA
atggacatgagggtgcccgctcagctcctggggctcctgctgctgtggctgagaggtgcgcgctgtgaaatcgtgatgacgcagtctccagccaccctgtctgtgtctccaggggaaagagccaccctctcctgcagggccagtcagagtattaacagcaacttagcctggtaccagcagaaacctggccaggctcccaggctcctcatctatggtgcatataccagggccactggtatcccagacaggttcagtggcagtgggtctgggacagagttcactctcaccatcagcagcctgcagtctgaagattttgcagtttattactgtcaggagtttattatgtttcctccgtggacgttcggccaggggaccaaggtggaaatcaaacgaacggtggctgcaccatctgtcttcatcttcccgccatctgatgagcagttgaaatctggaactgcctctgttgtgtgcctgctgaataacttctatcccagagaggccaaagtacagtggaaggtggataacgccctccaatcgggtaactcccaggagagtgtcacagagcaggacagcaaggacagcacctacagcctcagcagcaccctgacgctgagcaaagcagactacgagaaacacaaagtctacgcctgcgaagtcacccatcagggcctgagctcgcccgtcacaaagagcttcaacaggggagagtgttag

SEQ ID NO: 2247 - protein, 215 aa, synthetic construct
  REGION 1..215: note = Synthetic
EIVMTQSPATLSVSPGERATLSCRASQSINSNLAWYQQKPGQAPRLLIYGAYTRATGIPDRFSGSGSGTEFTLTISSLQSEDFAVYYCQEFIMWPPYTFGQGTKVEIKRTVAAPSVFIFPPSDEQLKSGTASVVCLLNNFYPREAKVQWKVDNALQSGNSQESVTEQDSKDSTYSLSSTLTLSKADYEKHKVYACEVTHQGLSSPVTKSFNRGEC

SEQ ID NO: 2248 - DNA, 714 bp, synthetic construct
  misc_feature 1..714: note = Synthetic
  source 1..714: mol_type = other DNA
atggacatgagggtgcccgctcagctcctggggctcctgctgctgtggctgagaggtgcgcgctgtgaaatcgtgatgacgcagtctccagccaccctgtctgtgtctccaggggaaagagccaccctctcctgcagggccagtcagagtattaacagcaacttagcctggtaccagcagaaacctggccaggctcccaggctcctcatctatggtgcatataccagggccactggtatcccagacaggttcagtggcagtgggtctgggacagagttcactctcaccatcagcagcctgcagtctgaagattttgcagtttattactgtcaggagtttattatgtggcctccgtatacgttcggccaggggaccaaggtggaaatcaaacgaacggtggctgcaccatctgtcttcatcttcccgccatctgatgagcagttgaaatctggaactgcctctgttgtgtgcctgctgaataacttctatcccagagaggccaaagtacagtggaaggtggataacgccctccaatcgggtaactcccaggagagtgtcacagagcaggacagcaaggacagcacctacagcctcagcagcaccctgacgctgagcaaagcagactacgagaaacacaaagtctacgcctgcgaagtcacccatcagggcctgagctcgcccgtcacaaagagcttcaacaggggagagtgttag

SEQ ID NO: 2249 - protein, 215 aa, synthetic construct
  REGION 1..215: note = Synthetic
EIVMTQSPATLSVSPGERATLSCRASQSINSNLAWYQQKPGQAPRLLIYGAYTRATGIPDRFSGSGSGTEFTLTISSLQSEDFAVYYCQEFIMWPPHTFGQGTKVEIKRTVAAPSVFIFPPSDEQLKSGTASVVCLLNNFYPREAKVQWKVDNALQSGNSQESVTEQDSKDSTYSLSSTLTLSKADYEKHKVYACEVTHQGLSSPVTKSFNRGEC

SEQ ID NO: 2250 - DNA, 714 bp, synthetic construct
  misc_feature 1..714: note = Synthetic
  source 1..714: mol_type = other DNA
atggacatgagggtgcccgctcagctcctggggctcctgctgctgtggctgagaggtgcgcgctgtgaaatcgtgatgacgcagtctccagccaccctgtctgtgtctccaggggaaagagccaccctctcctgcagggccagtcagagtattaacagcaacttagcctggtaccagcagaaacctggccaggctcccaggctcctcatctatggtgcatataccagggccactggtatcccagacaggttcagtggcagtgggtctgggacagagttcactctcaccatcagcagcctgcagtctgaagattttgcagtttattactgtcaggagtttattatgtggcctccgcatacgttcggccaggggaccaaggtggaaatcaaacgaacggtggctgcaccatctgtcttcatcttcccgccatctgatgagcagttgaaatctggaactgcctctgttgtgtgcctgctgaataacttctatcccagagaggccaaagtacagtggaaggtggataacgccctccaatcgggtaactcccaggagagtgtcacagagcaggacagcaaggacagcacctacagcctcagcagcaccctgacgctgagcaaagcagactacgagaaacacaaagtctacgcctgcgaagtcacccatcagggcctgagctcgcccgtcacaaagagcttcaacaggggagagtgttag

SEQ ID NO: 2251 - protein, 215 aa, synthetic construct
  REGION 1..215: note = Synthetic
EIVMTQSPATLSVSPGERATLSCRASQSINSNLAWYQQKPGQAPRLLIYGAYTRATGIPDRFSGSGSGTEFTLTISSLQSEDFAVYYCQEFIMWPPNTFGQGTKVEIKRTVAAPSVFIFPPSDEQLKSGTASVVCLLNNFYPREAKVQWKVDNALQSGNSQESVTEQDSKDSTYSLSSTLTLSKADYEKHKVYACEVTHQGLSSPVTKSFNRGEC

SEQ ID NO: 2252 - DNA, 714 bp, synthetic construct
  misc_feature 1..714: note = Synthetic
  source 1..714: mol_type = other DNA
atggacatgagggtgcccgctcagctcctggggctcctgctgctgtggctgagaggtgcgcgctgtgaaatcgtgatgacgcagtctccagccaccctgtctgtgtctccaggggaaagagccaccctctcctgcagggccagtcagagtattaacagcaacttagcctggtaccagcagaaacctggccaggctcccaggctcctcatctatggtgcatataccagggccactggtatcccagacaggttcagtggcagtgggtctgggacagagttcactctcaccatcagcagcctgcagtctgaagattttgcagtttattactgtcaggagtttattatgtggcctccgaatacgttcggccaggggaccaaggtggaaatcaaacgaacggtggctgcaccatctgtcttcatcttcccgccatctgatgagcagttgaaatctggaactgcctctgttgtgtgcctgctgaataacttctatcccagagaggccaaagtacagtggaaggtggataacgccctccaatcgggtaactcccaggagagtgtcacagagcaggacagcaaggacagcacctacagcctcagcagcaccctgacgctgagcaaagcagactacgagaaacacaaagtctacgcctgcgaagtcacccatcagggcctgagctcgcccgtcacaaagagcttcaacaggggagagtgttag

SEQ ID NO: 2253 - protein, 215 aa, synthetic construct
  REGION 1..215: note = Synthetic
EIVMTQSPATLSVSPGERATLSCRASQSINSNLAWYQQKPGQAPRLLIYGAYTRATGIPDRFSGSGSGTEFTLTISSLQSEDFAVYYCQEFIMWPPWTFGQGTKVEIKRTVAAPSVFIFPPSDEQLKSGTASVVCLLNNFYPREAKVQWKVDNALQSGNSQESVTEQDSKDSTYSLSSTLTLSKADYEKHKVYACEVTHQGLSSPVTKSFNRGEC

SEQ ID NO: 2254 - DNA, 714 bp, synthetic construct; identical to SEQ ID NO: 304
  misc_feature 1..714: note = Synthetic
  source 1..714: mol_type = other DNA

SEQ ID NO: 2255 - protein, 215 aa, synthetic construct
  REGION 1..215: note = Synthetic
EIVMTQSPATLSVSPGERATLSCRASQSINANLAWYQQKPGQAPRLLIYGAYTRATGIPDRFSGSGSGTEFTLTISSLQSEDFAVYYCQEFILWPPWTFGQGTKVEIKRTVAAPSVFIFPPSDEQLKSGTASVVCLLNNFYPREAKVQWKVDNALQSGNSQESVTEQDSKDSTYSLSSTLTLSKADYEKHKVYACEVTHQGLSSPVTKSFNRGEC

SEQ ID NO: 2256 - DNA, 714 bp, synthetic construct
  misc_feature 1..714: note = Synthetic
  source 1..714: mol_type = other DNA
atggacatgagggtgcccgctcagctcctggggctcctgctgctgtggctgagaggtgcgcgctgtgaaatcgtgatgacgcagtctccagccaccctgtctgtgtctccaggggaaagagccaccctctcctgcagggccagtcagagtattaacgctaacttagcctggtaccagcagaaacctggccaggctcccaggctcctcatctatggtgcatataccagggccactggtatcccagacaggttcagtggcagtgggtctgggacagagttcactctcaccatcagcagcctgcagtctgaagattttgcagtttattactgtcaggagtttattctttggcctccgtggacgttcggccaggggaccaaggtggaaatcaaacgaacggtggctgcaccatctgtcttcatcttcccgccatctgatgagcagttgaaatctggaactgcctctgttgtgtgcctgctgaataacttctatcccagagaggccaaagtacagtggaaggtggataacgccctccaatcgggtaactcccaggagagtgtcacagagcaggacagcaaggacagcacctacagcctcagcagcaccctgacgctgagcaaagcagactacgagaaacacaaagtctacgcctgcgaagtcacccatcagggcctgagctcgcccgtcacaaagagcttcaacaggggagagtgttag

SEQ ID NO: 2257 - protein, 215 aa, synthetic construct
  REGION 1..215: note = Synthetic
EIVMTQSPATLSVSPGERATLSCRASQSINANLAWYQQKPGQAPRLLIYGAYTRATGIPDRFSGSGSGTEFTLTISSLQSEDFAVYYCQEFILWPPHTFGQGTKVEIKRTVAAPSVFIFPPSDEQLKSGTASVVCLLNNFYPREAKVQWKVDNALQSGNSQESVTEQDSKDSTYSLSSTLTLSKADYEKHKVYACEVTHQGLSSPVTKSFNRGEC

SEQ ID NO: 2258 - DNA, 714 bp, synthetic construct
  misc_feature 1..714: note = Synthetic
  source 1..714: mol_type = other DNA
atggacatgagggtgcccgctcagctcctggggctcctgctgctgtggctgagaggtgcgcgctgtgaaatcgtgatgacgcagtctccagccaccctgtctgtgtctccaggggaaagagccaccctctcctgcagggccagtcagagtattaacgctaacttagcctggtaccagcagaaacctggccaggctcccaggctcctcatctatggtgcatataccagggccactggtatcccagacaggttcagtggcagtgggtctgggacagagttcactctcaccatcagcagcctgcagtctgaagattttgcagtttattactgtcaggagtttattctttggcctccgcatacgttcggccaggggaccaaggtggaaatcaaacgaacggtggctgcaccatctgtcttcatcttcccgccatctgatgagcagttgaaatctggaactgcctctgttgtgtgcctgctgaataacttctatcccagagaggccaaagtacagtggaaggtggataacgccctccaatcgggtaactcccaggagagtgtcacagagcaggacagcaaggacagcacctacagcctcagcagcaccctgacgctgagcaaagcagactacgagaaacacaaagtctacgcctgcgaagtcacccatcagggcctgagctcgcccgtcacaaagagcttcaacaggggagagtgttag

SEQ ID NO: 2259 - protein, 215 aa, synthetic construct
  REGION 1..215: note = Synthetic
EIVMTQSPATLSVSPGERATLSCRASQSINANLAWYQQKPGQAPRLLIYGAYTRATGIPDRFSGSGSGTEFTLTISSLQSEDFAVYYCQEFILWPPNTFGQGTKVEIKRTVAAPSVFIFPPSDEQLKSGTASVVCLLNNFYPREAKVQWKVDNALQSGNSQESVTEQDSKDSTYSLSSTLTLSKADYEKHKVYACEVTHQGLSSPVTKSFNRGEC

SEQ ID NO: 2260 - DNA, 714 bp, synthetic construct
  misc_feature 1..714: note = Synthetic
  source 1..714: mol_type = other DNA
atggacatgagggtgcccgctcagctcctggggctcctgctgctgtggctgagaggtgcgcgctgtgaaatcgtgatgacgcagtctccagccaccctgtctgtgtctccaggggaaagagccaccctctcctgcagggccagtcagagtattaacgctaacttagcctggtaccagcagaaacctggccaggctcccaggctcctcatctatggtgcatataccagggccactggtatcccagacaggttcagtggcagtgggtctgggacagagttcactctcaccatcagcagcctgcagtctgaagattttgcagtttattactgtcaggagtttattctttggcctccgaatacgttcggccaggggaccaaggtggaaatcaaacgaacggtggctgcaccatctgtcttcatcttcccgccatctgatgagcagttgaaatctggaactgcctctgttgtgtgcctgctgaataacttctatcccagagaggccaaagtacagtggaaggtggataacgccctccaatcgggtaactcccaggagagtgtcacagagcaggacagcaaggacagcacctacagcctcagcagcaccctgacgctgagcaaagcagactacgagaaacacaaagtctacgcctgcgaagtcacccatcagggcctgagctcgcccgtcacaaagagcttcaacaggggagagtgttag

SEQ ID NO: 2261 - protein, 215 aa, synthetic construct
  REGION 1..215: note = Synthetic
EIVMTQSPATLSVSPGERATLSCRASQSINANLAWYQQKPGQAPRLLIYGAYTRATGIPDRFSGSGSGTEFTLTISSLQSEDFAVYYCQEFILFPPWTFGQGTKVEIKRTVAAPSVFIFPPSDEQLKSGTASVVCLLNNFYPREAKVQWKVDNALQSGNSQESVTEQDSKDSTYSLSSTLTLSKADYEKHKVYACEVTHQGLSSPVTKSFNRGEC

SEQ ID NO: 2262 - DNA, 714 bp, synthetic construct
  misc_feature 1..714: note = Synthetic
  source 1..714: mol_type = other DNA
atggacatgagggtgcccgctcagctcctggggctcctgctgctgtggctgagaggtgcgcgctgtgaaatcgtgatgacgcagtctccagccaccctgtctgtgtctccaggggaaagagccaccctctcctgcagggccagtcagagtattaacgctaacttagcctggtaccagcagaaacctggccaggctcccaggctcctcatctatggtgcatataccagggccactggtatcccagacaggttcagtggcagtgggtctgggacagagttcactctcaccatcagcagcctgcagtctgaagattttgcagtttattactgtcaggagtttattctttttcctccgtggacgttcggccaggggaccaaggtggaaatcaaacgaacggtggctgcaccatctgtcttcatcttcccgccatctgatgagcagttgaaatctggaactgcctctgttgtgtgcctgctgaataacttctatcccagagaggccaaagtacagtggaaggtggataacgccctccaatcgggtaactcccaggagagtgtcacagagcaggacagcaaggacagcacctacagcctcagcagcaccctgacgctgagcaaagcagactacgagaaacacaaagtctacgcctgcgaagtcacccatcagggcctgagctcgcccgtcacaaagagcttcaacaggggagagtgttag

SEQ ID NO: 2263 - protein, 215 aa, synthetic construct
  REGION 1..215: note = Synthetic
EIVMTQSPATLSVSPGERATLSCRASQSINANLAWYQQKPGQAPRLLIYGAYTRATGIPDRFSGSGSGTEFTLTISSLQSEDFAVYYCQEFILFPPNTFGQGTKVEIKRTVAAPSVFIFPPSDEQLKSGTASVVCLLNNFYPREAKVQWKVDNALQSGNSQESVTEQDSKDSTYSLSSTLTLSKADYEKHKVYACEVTHQGLSSPVTKSFNRGEC

SEQ ID NO: 2264 - DNA, 714 bp, synthetic construct
  misc_feature 1..714: note = Synthetic
  source 1..714: mol_type = other DNA
atggacatgagggtgcccgctcagctcctggggctcctgctgctgtggctgagaggtgcgcgctgtgaaatcgtgatgacgcagtctccagccaccctgtctgtgtctccaggggaaagagccaccctctcctgcagggccagtcagagtattaacgctaacttagcctggtaccagcagaaacctggccaggctcccaggctcctcatctatggtgcatataccagggccactggtatcccagacaggttcagtggcagtgggtctgggacagagttcactctcaccatcagcagcctgcagtctgaagattttgcagtttattactgtcaggagtttattctttttcctccgaatacgttcggccaggggaccaaggtggaaatcaaacgaacggtggctgcaccatctgtcttcatcttcccgccatctgatgagcagttgaaatctggaactgcctctgttgtgtgcctgctgaataacttctatcccagagaggccaaagtacagtggaaggtggataacgccctccaatcgggtaactcccaggagagtgtcacagagcaggacagcaaggacagcacctacagcctcagcagcaccctgacgctgagcaaagcagactacgagaaacacaaagtctacgcctgcgaagtcacccatcagggcctgagctcgcccgtcacaaagagcttcaacaggggagagtgttag

SEQ ID NO: 2265 - protein, 215 aa, synthetic construct
  REGION 1..215: note = Synthetic
EIVMTQSPATLSVSPGERATLSCRASQSINANLAWYQQKPGQAPRLLIYGAYTRATGIPDRFSGSGSGTEFTLTISSLQSEDFAVYYCQEFILFPPHTFGQGTKVEIKRTVAAPSVFIFPPSDEQLKSGTASVVCLLNNFYPREAKVQWKVDNALQSGNSQESVTEQDSKDSTYSLSSTLTLSKADYEKHKVYACEVTHQGLSSPVTKSFNRGEC

SEQ ID NO: 2266 - DNA, 714 bp, synthetic construct
  misc_feature 1..714: note = Synthetic
  source 1..714: mol_type = other DNA
atggacatgagggtgcccgctcagctcctggggctcctgctgctgtggctgagaggtgcgcgctgtgaaatcgtgatgacgcagtctccagccaccctgtctgtgtctccaggggaaagagccaccctctcctgcagggccagtcagagtattaacgctaacttagcctggtaccagcagaaacctggccaggctcccaggctcctcatctatggtgcatataccagggccactggtatcccagacaggttcagtggcagtgggtctgggacagagttcactctcaccatcagcagcctgcagtctgaagattttgcagtttattactgtcaggagtttattctttttcctccgcatacgttcggccaggggaccaaggtggaaatcaaacgaacggtggctgcaccatctgtcttcatcttcccgccatctgatgagcagttgaaatctggaactgcctctgttgtgtgcctgctgaataacttctatcccagagaggccaaagtacagtggaaggtggataacgccctccaatcgggtaactcccaggagagtgtcacagagcaggacagcaaggacagcacctacagcctcagcagcaccctgacgctgagcaaagcagactacgagaaacacaaagtctacgcctgcgaagtcacccatcagggcctgagctcgcccgtcacaaagagcttcaacaggggagagtgttag

SEQ ID NO: 2267 - protein, 215 aa, synthetic construct
  REGION 1..215: note = Synthetic
EIVMTQSPATLSVSPGERATLSCRASQSINHNLAWYQQKPGQAPRLLIYGAYTRATGIPDRFSGSGSGTEFTLTISSLQSEDFAVYYCQEFILWPPWTFGQGTKVEIKRTVAAPSVFIFPPSDEQLKSGTASVVCLLNNFYPREAKVQWKVDNALQSGNSQESVTEQDSKDSTYSLSSTLTLSKADYEKHKVYACEVTHQGLSSPVTKSFNRGEC

SEQ ID NO: 2268 - DNA, 714 bp, synthetic construct
  misc_feature 1..714: note = Synthetic
  source 1..714: mol_type = other DNA
atggacatgagggtgcccgctcagctcctggggctcctgctgctgtggctgagaggtgcgcgctgtgaaatcgtgatgacgcagtctccagccaccctgtctgtgtctccaggggaaagagccaccctctcctgcagggccagtcagagtattaaccataacttagcctggtaccagcagaaacctggccaggctcccaggctcctcatctatggtgcatataccagggccactggtatcccagacaggttcagtggcagtgggtctgggacagagttcactctcaccatcagcagcctgcagtctgaagattttgcagtttattactgtcaggagtttattctttggcctccgtggacgttcggccaggggaccaaggtggaaatcaaacgaacggtggctgcaccatctgtcttcatcttcccgccatctgatgagcagttgaaatctggaactgcctctgttgtgtgcctgctgaataacttctatcccagagaggccaaagtacagtggaaggtggataacgccctccaatcgggtaactcccaggagagtgtcacagagcaggacagcaaggacagcacctacagcctcagcagcaccctgacgctgagcaaagcagactacgagaaacacaaagtctacgcctgcgaagtcacccatcagggcctgagctcgcccgtcacaaagagcttcaacaggggagagtgttag

SEQ ID NO: 2269 - protein, 215 aa, synthetic construct
  REGION 1..215: note = Synthetic
EIVMTQSPATLSVSPGERATLSCRASQSINHNLAWYQQKPGQAPRLLIYGAYTRATGIPDRFSGSGSGTEFTLTISSLQSEDFAVYYCQEFILWPPNTFGQGTKVEIKRTVAAPSVFIFPPSDEQLKSGTASVVCLLNNFYPREAKVQWKVDNALQSGNSQESVTEQDSKDSTYSLSSTLTLSKADYEKHKVYACEVTHQGLSSPVTKSFNRGEC

SEQ ID NO: 2270 - DNA, 714 bp, synthetic construct
  misc_feature 1..714: note = Synthetic
  source 1..714: mol_type = other DNA
atggacatgagggtgcccgctcagctcctggggctcctgctgctgtggctgagaggtgcgcgctgtgaaatcgtgatgacgcagtctccagccaccctgtctgtgtctccaggggaaagagccaccctctcctgcagggccagtcagagtattaaccataacttagcctggtaccagcagaaacctggccaggctcccaggctcctcatctatggtgcatataccagggccactggtatcccagacaggttcagtggcagtgggtctgggacagagttcactctcaccatcagcagcctgcagtctgaagattttgcagtttattactgtcaggagtttattctttggcctccgaatacgttcggccaggggaccaaggtggaaatcaaacgaacggtggctgcaccatctgtcttcatcttcccgccatctgatgagcagttgaaatctggaactgcctctgttgtgtgcctgctgaataacttctatcccagagaggccaaagtacagtggaaggtggataacgccctccaatcgggtaactcccaggagagtgtcacagagcaggacagcaaggacagcacctacagcctcagcagcaccctgacgctgagcaaagcagactacgagaaacacaaagtctacgcctgcgaagtcacccatcagggcctgagctcgcccgtcacaaagagcttcaacaggggagagtgttag

SEQ ID NO: 2271 - protein, 215 aa, synthetic construct
  REGION 1..215: note = Synthetic
EIVMTQSPATLSVSPGERATLSCRASQSINHNLAWYQQKPGQAPRLLIYGAYTRATGIPDRFSGSGSGTEFTLTISSLQSEDFAVYYCQEFILWPPHTFGQGTKVEIKRTVAAPSVFIFPPSDEQLKSGTASVVCLLNNFYPREAKVQWKVDNALQSGNSQESVTEQDSKDSTYSLSSTLTLSKADYEKHKVYACEVTHQGLSSPVTKSFNRGEC

SEQ ID NO: 2272 - DNA, 714 bp, synthetic construct
  misc_feature 1..714: note = Synthetic
  source 1..714: mol_type = other DNA
atggacatgagggtgcccgctcagctcctggggctcctgctgctgtggctgagaggtgcgcgctgtgaaatcgtgatgacgcagtctccagccaccctgtctgtgtctccaggggaaagagccaccctctcctgcagggccagtcagagtattaaccataacttagcctggtaccagcagaaacctggccaggctcccaggctcctcatctatggtgcatataccagggccactggtatcccagacaggttcagtggcagtgggtctgggacagagttcactctcaccatcagcagcctgcagtctgaagattttgcagtttattactgtcaggagtttattctttggcctccgcatacgttcggccaggggaccaaggtggaaatcaaacgaacggtggctgcaccatctgtcttcatcttcccgccatctgatgagcagttgaaatctggaactgcctctgttgtgtgcctgctgaataacttctatcccagagaggccaaagtacagtggaaggtggataacgccctccaatcgggtaactcccaggagagtgtcacagagcaggacagcaaggacagcacctacagcctcagcagcaccctgacgctgagcaaagcagactacgagaaacacaaagtctacgcctgcgaagtcacccatcagggcctgagctcgcccgtcacaaagagcttcaacaggggagagtgttag

SEQ ID NO: 2273 - protein, 215 aa, synthetic construct
  REGION 1..215: note = Synthetic
EIVMTQSPATLSVSPGERATLSCRASQSINHNLAWYQQKPGQAPRLLIYGAYTRATGIPDRFSGSGSGTEFTLTISSLQSEDFAVYYCQEFILFPPWTFGQGTKVEIKRTVAAPSVFIFPPSDEQLKSGTASVVCLLNNFYPREAKVQWKVDNALQSGNSQESVTEQDSKDSTYSLSSTLTLSKADYEKHKVYACEVTHQGLSSPVTKSFNRGEC

SEQ ID NO: 2274 - DNA, 714 bp, synthetic construct
  misc_feature 1..714: note = Synthetic
  source 1..714: mol_type = other DNA
atggacatgagggtgcccgctcagctcctggggctcctgctgctgtggctgagaggtgcgcgctgtgaaatcgtgatgacgcagtctccagccaccctgtctgtgtctccaggggaaagagccaccctctcctgcagggccagtcagagtattaaccataacttagcctggtaccagcagaaacctggccaggctcccaggctcctcatctatggtgcatataccagggccactggtatcccagacaggttcagtggcagtgggtctgggacagagttcactctcaccatcagcagcctgcagtctgaagattttgcagtttattactgtcaggagtttattctttttcctccgtggacgttcggccaggggaccaaggtggaaatcaaacgaacggtggctgcaccatctgtcttcatcttcccgccatctgatgagcagttgaaatctggaactgcctctgttgtgtgcctgctgaataacttctatcccagagaggccaaagtacagtggaaggtggataacgccctccaatcgggtaactcccaggagagtgtcacagagcaggacagcaaggacagcacctacagcctcagcagcaccctgacgctgagcaaagcagactacgagaaacacaaagtctacgcctgcgaagtcacccatcagggcctgagctcgcccgtcacaaagagcttcaacaggggagagtgttag

SEQ ID NO: 2275 - protein, 215 aa, synthetic construct
  REGION 1..215: note = Synthetic
EIVMTQSPATLSVSPGERATLSCRASQSINHNLAWYQQKPGQAPRLLIYGAYTRATGIPDRFSGSGSGTEFTLTISSLQSEDFAVYYCQEFILFPPNTFGQGTKVEIKRTVAAPSVFIFPPSDEQLKSGTASVVCLLNNFYPREAKVQWKVDNALQSGNSQESVTEQDSKDSTYSLSSTLTLSKADYEKHKVYACEVTHQGLSSPVTKSFNRGEC

SEQ ID NO: 2276 - DNA, 714 bp, synthetic construct
  misc_feature 1..714: note = Synthetic
  source 1..714: mol_type = other DNA
atggacatgagggtgcccgctcagctcctggggctcctgctgctgtggctgagaggtgcgcgctgtgaaatcgtgatgacgcagtctccagccaccctgtctgtgtctccaggggaaagagccaccctctcctgcagggccagtcagagtattaaccataacttagcctggtaccagcagaaacctggccaggctcccaggctcctcatctatggtgcatataccagggccactggtatcccagacaggttcagtggcagtgggtctgggacagagttcactctcaccatcagcagcctgcagtctgaagattttgcagtttattactgtcaggagtttattctttttcctccgaatacgttcggccaggggaccaaggtggaaatcaaacgaacggtggctgcaccatctgtcttcatcttcccgccatctgatgagcagttgaaatctggaactgcctctgttgtgtgcctgctgaataacttctatcccagagaggccaaagtacagtggaaggtggataacgccctccaatcgggtaactcccaggagagtgtcacagagcaggacagcaaggacagcacctacagcctcagcagcaccctgacgctgagcaaagcagactacgagaaacacaaagtctacgcctgcgaagtcacccatcagggcctgagctcgcccgtcacaaagagcttcaacaggggagagtgttag

SEQ ID NO: 2277 - protein, 215 aa, synthetic construct
  REGION 1..215: note = Synthetic
EIVMTQSPATLSVSPGERATLSCRASQSINHNLAWYQQKPGQAPRLLIYGAYTRATGIPDRFSGSGSGTEFTLTISSLQSEDFAVYYCQEFILFPPHTFGQGTKVEIKRTVAAPSVFIFPPSDEQLKSGTASVVCLLNNFYPREAKVQWKVDNALQSGNSQESVTEQDSKDSTYSLSSTLTLSKADYEKHKVYACEVTHQGLSSPVTKSFNRGEC

SEQ ID NO: 2278 - DNA, 714 bp, synthetic construct
  misc_feature 1..714: note = Synthetic
  source 1..714: mol_type = other DNA
atggacatgagggtgcccgctcagctcctggggctcctgctgctgtggctgagaggtgcgcgctgtgaaatcgtgatgacgcagtctccagccaccctgtctgtgtctccaggggaaagagccaccctctcctgcagggccagtcagagtattaaccataacttagcctggtaccagcagaaacctggccaggctcccaggctcctcatctatggtgcatataccagggccactggtatcccagacaggttcagtggcagtgggtctgggacagagttcactctcaccatcagcagcctgcagtctgaagattttgcagtttattactgtcaggagtttattctttttcctccgcatacgttcggccaggggaccaaggtggaaatcaaacgaacggtggctgcaccatctgtcttcatcttcccgccatctgatgagcagttgaaatctggaactgcctctgttgtgtgcctgctgaataacttctatcccagagaggccaaagtacagtggaaggtggataacgccctccaatcgggtaactcccaggagagtgtcacagagcaggacagcaaggacagcacctacagcctcagcagcaccctgacgctgagcaaagcagactacgagaaacacaaagtctacgcctgcgaagtcacccatcagggcctgagctcgcccgtcacaaagagcttcaacaggggagagtgttag

SEQ ID NO: 2279 - protein, 215 aa, synthetic construct
  REGION 1..215: note = Synthetic
EIVMTQSPATLSVSPGERATLSCRASQSVNSNLAWYQQKPGQAPRLLIYGASTRATGIPARFSGSGSGTEFTLTISSLQSEDFAVYYCQQFYNWPPWTFGQGTKVEIKRTVAAPSVFIFPPSDEQLKSGTASVVCLLNNFYPREAKVQWKVDNALQSGNSQESVTEQDSKDSTYSLSSTLTLSKADYEKHKVYACEVTHQGLSSPVTKSFNRGEC

SEQ ID NO: 2280 - DNA, 714 bp, synthetic construct
  misc_feature 1..714: note = Synthetic
  source 1..714: mol_type = other DNA
atggacatgagggtgcccgctcagctcctggggctcctgctgctgtggctgagaggtgcgcgctgtgaaatcgtgatgacgcagtctccagccaccctgtctgtgtctccaggggaaagagccaccctctcctgcagggccagtcagagtgttaacagcaacttagcctggtaccagcagaaacctggccaagctcccaggctcctcatctatggtgcatccaccagggccactggtatcccagccaggttcagtggcagtgggtctgggacagagttcactctcaccatcagcagcctgcagtctgaagattttgcagtttattactgtcagcagttttataactggcctccgtggacgttcggccaggggaccaaggtggaaatcaaacgaacggtggctgcaccatctgtcttcatcttcccgccatctgatgagcagttgaaatctggaactgcctctgttgtgtgcctgctgaataacttctatcccagagaggccaaagtacagtggaaggtggataacgccctccaatcgggtaactcccaggagagtgtcacagagcaggacagcaaggacagcacctacagcctcagcagcaccctgacgctgagcaaagcagactacgagaaacacaaagtctacgcctgcgaagtcacccatcagggcctgagctcgcccgtcacaaagagcttcaacaggggagagtgttag

SEQ ID NO: 2281 - protein, 215 aa, synthetic construct
  REGION 1..215: note = Synthetic
EIVMTQSPATLSVSPGERATLSCRASQSVNANLAWYQQKPGQAPRLLIYGASTRATGIPARFSGSGSGTEFTLTISSLQSEDFAVYYCQQFYNWPPWTFGQGTKVEIKRTVAAPSVFIFPPSDEQLKSGTASVVCLLNNFYPREAKVQWKVDNALQSGNSQESVTEQDSKDSTYSLSSTLTLSKADYEKHKVYACEVTHQGLSSPVTKSFNRGEC

SEQ ID NO: 2282 - DNA, 714 bp, synthetic construct
  misc_feature 1..714: note = Synthetic
  source 1..714: mol_type = other DNA
atggacatgagggtgcccgctcagctcctggggctcctgctgctgtggctgagaggtgcgcgctgtgaaatcgtgatgacgcagtctccagccaccctgtctgtgtctccaggggaaagagccaccctctcctgcagggccagtcagagtgttaacgctaacttagcctggtaccagcagaaacctggccaagctcccaggctcctcatctatggtgcatccaccagggccactggtatcccagccaggttcagtggcagtgggtctgggacagagttcactctcaccatcagcagcctgcagtctgaagattttgcagtttattactgtcagcagttttataactggcctccgtggacgttcggccaggggaccaaggtggaaatcaaacgaacggtggctgcaccatctgtcttcatcttcccgccatctgatgagcagttgaaatctggaactgcctctgttgtgtgcctgctgaataacttctatcccagagaggccaaagtacagtggaaggtggataacgccctccaatcgggtaactcccaggagagtgtcacagagcaggacagcaaggacagcacctacagcctcagcagcaccctgacgctgagcaaagcagactacgagaaacacaaagtctacgcctgcgaagtcacccatcagggcctgagctcgcccgtcacaaagagcttcaacaggggagagtgttag

SEQ ID NO: 2283 - protein, 215 aa, synthetic construct
  REGION 1..215: note = Synthetic
EIVMTQSPATLSVSPGERATLSCRASQSVNINLAWYQQKPGQAPRLLIYGASTRATGIPARFSGSGSGTEFTLTISSLQSEDFAVYYCQQFYNWPPWTFGQGTKVEIKRTVAAPSVFIFPPSDEQLKSGTASVVCLLNNFYPREAKVQWKVDNALQSGNSQESVTEQDSKDSTYSLSSTLTLSKADYEKHKVYACEVTHQGLSSPVTKSFNRGEC

SEQ ID NO: 2284 - DNA, 714 bp, synthetic construct
  misc_feature 1..714: note = Synthetic
  source 1..714: mol_type = other DNA
atggacatgagggtgcccgctcagctcctggggctcctgctgctgtggctgagaggtgcgcgctgtgaaatcgtgatgacgcagtctccagccaccctgtctgtgtctccaggggaaagagccaccctctcctgcagggccagtcagagtgttaacattaacttagcctggtaccagcagaaacctggccaagctcccaggctcctcatctatggtgcatccaccagggccactggtatcccagccaggttcagtggcagtgggtctgggacagagttcactctcaccatcagcagcctgcagtctgaagattttgcagtttattactgtcagcagttttataactggcctccgtggacgttcggccaggggaccaaggtggaaatcaaacgaacggtggctgcaccatctgtcttcatcttcccgccatctgatgagcagttgaaatctggaactgcctctgttgtgtgcctgctgaataacttctatcccagagaggccaaagtacagtggaaggtggataacgccctccaatcgggtaactcccaggagagtgtcacagagcaggacagcaaggacagcacctacagcctcagcagcaccctgacgctgagcaaagcagactacgagaaacacaaagtctacgcctgcgaagtcacccatcagggcctgagctcgcccgtcacaaagagcttcaacaggggagagtgttag

SEQ ID NO: 2285 - protein, 215 aa, synthetic construct
  REGION 1..215: note = Synthetic
EIVMTQSPATLSVSPGERATLSCRASQSVNHNLAWYQQKPGQAPRLLIYGASTRATGIPARFSGSGSGTEFTLTISSLQSEDFAVYYCQQFYNWPPWTFGQGTKVEIKRTVAAPSVFIFPPSDEQLKSGTASVVCLLNNFYPREAKVQWKVDNALQSGNSQESVTEQDSKDSTYSLSSTLTLSKADYEKHKVYACEVTHQGLSSPVTKSFNRGEC

SEQ ID NO: 2286 - DNA, 714 bp, synthetic construct
  misc_feature 1..714: note = Synthetic
  source 1..714: mol_type = other DNA
atggacatgagggtgcccgctcagctcctggggctcctgctgctgtggctgagaggtgcgcgctgtgaaatcgtgatgacgcagtctccagccaccctgtctgtgtctccaggggaaagagccaccctctcctgcagggccagtcagagtgttaaccataacttagcctggtaccagcagaaacctggccaagctcccaggctcctcatctatggtgcatccaccagggccactggtatcccagccaggttcagtggcagtgggtctgggacagagttcactctcaccatcagcagcctgcagtctgaagattttgcagtttattactgtcagcagttttataactggcctccgtggacgttcggccaggggaccaaggtggaaatcaaacgaacggtggctgcaccatctgtcttcatcttcccgccatctgatgagcagttgaaatctggaactgcctctgttgtgtgcctgctgaataacttctatcccagagaggccaaagtacagtggaaggtggataacgccctccaatcgggtaactcccaggagagtgtcacagagcaggacagcaaggacagcacctacagcctcagcagcaccctgacgctgagcaaagcagactacgagaaacacaaagtctacgcctgcgaagtcacccatcagggcctgagctcgcccgtcacaaagagcttcaacaggggagagtgttag

SEQ ID NO: 2287 - protein, 215 aa, synthetic construct
  REGION 1..215: note = Synthetic
EIVMTQSPATLSVSPGERATLSCRASQSVNVNLAWYQQKPGQAPRLLIYGASTRATGIPARFSGSGSGTEFTLTISSLQSEDFAVYYCQQFYNWPPWTFGQGTKVEIKRTVAAPSVFIFPPSDEQLKSGTASVVCLLNNFYPREAKVQWKVDNALQSGNSQESVTEQDSKDSTYSLSSTLTLSKADYEKHKVYACEVTHQGLSSPVTKSFNRGEC

SEQ ID NO: 2288 - DNA, 714 bp, synthetic construct
  misc_feature 1..714: note = Synthetic
  source 1..714: mol_type = other DNA
atggacatgagggtgcccgctcagctcctggggctcctgctgctgtggctgagaggtgcgcgctgtgaaatcgtgatgacgcagtctccagccaccctgtctgtgtctccaggggaaagagccaccctctcctgcagggccagtcagagtgttaacgttaacttagcctggtaccagcagaaacctggccaagctcccaggctcctcatctatggtgcatccaccagggccactggtatcccagccaggttcagtggcagtgggtctgggacagagttcactctcaccatcagcagcctgcagtctgaagattttgcagtttattactgtcagcagttttataactggcctccgtggacgttcggccaggggaccaaggtggaaatcaaacgaacggtggctgcaccatctgtcttcatcttcccgccatctgatgagcagttgaaatctggaactgcctctgttgtgtgcctgctgaataacttctatcccagagaggccaaagtacagtggaaggtggataacgccctccaatcgggtaactcccaggagagtgtcacagagcaggacagcaaggacagcacctacagcctcagcagcaccctgacgctgagcaaagcagactacgagaaacacaaagtctacgcctgcgaagtcacccatcagggcctgagctcgcccgtcacaaagagcttcaacaggggagagtgttag

SEQ ID NO: 2289 - protein, 215 aa, synthetic construct
  REGION 1..215: note = Synthetic
EIVMTQSPATLSVSPGERATLSCRASQSVNSNLAWYQQKPGQAPRLLIYGASTRATGIPARFSGSGSGTEFTLTISSLQSEDFAVYYCQQFYNFPPWTFGQGTKVEIKRTVAAPSVFIFPPSDEQLKSGTASVVCLLNNFYPREAKVQWKVDNALQSGNSQESVTEQDSKDSTYSLSSTLTLSKADYEKHKVYACEVTHQGLSSPVTKSFNRGEC

SEQ ID NO: 2290 - DNA, 714 bp, synthetic construct
  misc_feature 1..714: note = Synthetic
  source 1..714: mol_type = other DNA
atggacatgagggtgcccgctcagctcctggggctcctgctgctgtggctgagaggtgcgcgctgtgaaatcgtgatgacgcagtctccagccaccctgtctgtgtctccaggggaaagagccaccctctcctgcagggccagtcagagtgttaacagcaacttagcctggtaccagcagaaacctggccaagctcccaggctcctcatctatggtgcatccaccagggccactggtatcccagccaggttcagtggcagtgggtctgggacagagttcactctcaccatcagcagcctgcagtctgaagattttgcagtttattactgtcagcagttttataactttcctccgtggacgttcggccaggggaccaaggtggaaatcaaacgaacggtggctgcaccatctgtcttcatcttcccgccatctgatgagcagttgaaatctggaactgcctctgttgtgtgcctgctgaataacttctatcccagagaggccaaagtacagtggaaggtggataacgccctccaatcgggtaactcccaggagagtgtcacagagcaggacagcaaggacagcacctacagcctcagcagcaccctgacgctgagcaaagcagactacgagaaacacaaagtctacgcctgcgaagtcacccatcagggcctgagctcgcccgtcacaaagagcttcaacaggggagagtgttag

SEQ ID NO: 2291 - protein, 215 aa, synthetic construct
  REGION 1..215: note = Synthetic
EIVMTQSPATLSVSPGERATLSCRASQSVNSNLAWYQQKPGQAPRLLIYGASTRATGIPARFSGSGSGTEFTLTISSLQSEDFAVYYCQQFYNWPPYTFGQGTKVEIKRTVAAPSVFIFPPSDEQLKSGTASVVCLLNNFYPREAKVQWKVDNALQSGNSQESVTEQDSKDSTYSLSSTLTLSKADYEKHKVYACEVTHQGLSSPVTKSFNRGEC

SEQ ID NO: 2292 - DNA, 714 bp, synthetic construct
  misc_feature 1..714: note = Synthetic
  source 1..714: mol_type = other DNA
atggacatgagggtgcccgctcagctcctggggctcctgctgctgtggctgagaggtgcgcgctgtgaaatcgtgatgacgcagtctccagccaccctgtctgtgtctccaggggaaagagccaccctctcctgcagggccagtcagagtgttaacagcaacttagcctggtaccagcagaaacctggccaagctcccaggctcctcatctatggtgcatccaccagggccactggtatcccagccaggttcagtggcagtgggtctgggacagagttcactctcaccatcagcagcctgcagtctgaagattttgcagtttattactgtcagcagttttataactggcctccgtatacgttcggccaggggaccaaggtggaaatcaaacgaacggtggctgcaccatctgtcttcatcttcccgccatctgatgagcagttgaaatctggaactgcctctgttgtgtgcctgctgaataacttctatcccagagaggccaaagtacagtggaaggtggataacgccctccaatcgggtaactcccaggagagtgtcacagagcaggacagcaaggacagcacctacagcctcagcagcaccctgacgctgagcaaagcagactacgagaaacacaaagtctacgcctgcgaagtcacccatcagggcctgagctcgcccgtcacaaagagcttcaacaggggagagtgttag

SEQ ID NO: 2293 - protein, 215 aa, synthetic construct
  REGION 1..215: note = Synthetic
EIVMTQSPATLSVSPGERATLSCRASQSVNSNLAWYQQKPGQAPRLLIYGASTRATGIPARFSGSGSGTEFTLTISSLQSEDFAVYYCQQFYNWPPHTFGQGTKVEIKRTVAAPSVFIFPPSDEQLKSGTASVVCLLNNFYPREAKVQWKVDNALQSGNSQESVTEQDSKDSTYSLSSTLTLSKADYEKHKVYACEVTHQGLSSPVTKSFNRGEC

SEQ ID NO: 2294 - DNA, 714 bp, synthetic construct
  misc_feature 1..714: note = Synthetic
  source 1..714: mol_type = other DNA
atggacatgagggtgcccgctcagctcctggggctcctgctgctgtggctgagaggtgcgcgctgtgaaatcgtgatgacgcagtctccagccaccctgtctgtgtctccaggggaaagagccaccctctcctgcagggccagtcagagtgttaacagcaacttagcctggtaccagcagaaacctggccaagctcccaggctcctcatctatggtgcatccaccagggccactggtatcccagccaggttcagtggcagtgggtctgggacagagttcactctcaccatcagcagcctgcagtctgaagattttgcagtttattactgtcagcagttttataactggcctccgcatacgttcggccaggggaccaaggtggaaatcaaacgaacggtggctgcaccatctgtcttcatcttcccgccatctgatgagcagttgaaatctggaactgcctctgttgtgtgcctgctgaataacttctatcccagagaggccaaagtacagtggaaggtggataacgccctccaatcgggtaactcccaggagagtgtcacagagcaggacagcaaggacagcacctacagcctcagcagcaccctgacgctgagcaaagcagactacgagaaacacaaagtctacgcctgcgaagtcacccatcagggcctgagctcgcccgtcacaaagagcttcaacaggggagagtgttag

SEQ ID NO: 2295 - protein, 215 aa, synthetic construct
  REGION 1..215: note = Synthetic
EIVMTQSPATLSVSPGERATLSCRASQSVNSNLAWYQQKPGQAPRLLIYGASTRATGIPARFSGSGSGTEFTLTISSLQSEDFAVYYCQQFYNWPPNTFGQGTKVEIKRTVAAPSVFIFPPSDEQLKSGTASVVCLLNNFYPREAKVQWKVDNALQSGNSQESVTEQDSKDSTYSLSSTLTLSKADYEKHKVYACEVTHQGLSSPVTKSFNRGEC

SEQ ID NO: 2296 - DNA, 714 bp, synthetic construct
  misc_feature 1..714: note = Synthetic
  source 1..714: mol_type = other DNA
atggacatgagggtgcccgctcagctcctggggctcctgctgctgtggctgagaggtgcgcgctgtgaaatcgtgatgacgcagtctccagccaccctgtctgtgtctccaggggaaagagccaccctctcctgcagggccagtcagagtgttaacagcaacttagcctggtaccagcagaaacctggccaagctcccaggctcctcatctatggtgcatccaccagggccactggtatcccagccaggttcagtggcagtgggtctgggacagagttcactctcaccatcagcagcctgcagtctgaagattttgcagtttattactgtcagcagttttataactggcctccgaatacgttcggccaggggaccaaggtggaaatcaaacgaacggtggctgcaccatctgtcttcatcttcccgccatctgatgagcagttgaaatctggaactgcctctgttgtgtgcctgctgaataacttctatcccagagaggccaaagtacagtggaaggtggataacgccctccaatcgggtaactcccaggagagtgtcacagagcaggacagcaaggacagcacctacagcctcagcagcaccctgacgctgagcaaagcagactacgagaaacacaaagtctacgcctgcgaagtcacccatcagggcctgagctcgcccgtcacaaagagcttcaacaggggagagtgttag

SEQ ID NO: 2297 - protein, 215 aa, synthetic construct; identical to SEQ ID NO: 2279
  REGION 1..215: note = Synthetic

SEQ ID NO: 2298 - DNA, 714 bp, synthetic construct; identical to SEQ ID NO: 2280
  misc_feature 1..714: note = Synthetic
  source 1..714: mol_type = other DNA

SEQ ID NO: 2299 - protein, 215 aa, synthetic construct; identical to SEQ ID NO: 2281
  REGION 1..215: note = Synthetic

SEQ ID NO: 2300 - DNA, 714 bp, synthetic construct; identical to SEQ ID NO: 2282
  misc_feature 1..714: note = Synthetic
  source 1..714: mol_type = other DNA

SEQ ID NO: 2301 - protein, 215 aa, synthetic construct
  REGION 1..215: note = Synthetic
EIVMTQSPATLSVSPGERATLSCRASQSVNANLAWYQQKPGQAPRLLIYGASTRATGIPARFSGSGSGTEFTLTISSLQSEDFAVYYCQQFYNFPPWTFGQGTKVEIKRTVAAPSVFIFPPSDEQLKSGTASVVCLLNNFYPREAKVQWKVDNALQSGNSQESVTEQDSKDSTYSLSSTLTLSKADYEKHKVYACEVTHQGLSSPVTKSFNRGEC

SEQ ID NO: 2302 - DNA, 714 bp, synthetic construct
  misc_feature 1..714: note = Synthetic
  source 1..714: mol_type = other DNA
atggacatgagggtgcccgctcagctcctggggctcctgctgctgtggctgagaggtgcgcgctgtgaaatcgtgatgacgcagtctccagccaccctgtctgtgtctccaggggaaagagccaccctctcctgcagggccagtcagagtgttaacgctaacttagcctggtaccagcagaaacctggccaagctcccaggctcctcatctatggtgcatccaccagggccactggtatcccagccaggttcagtggcagtgggtctgggacagagttcactctcaccatcagcagcctgcagtctgaagattttgcagtttattactgtcagcagttttataactttcctccgtggacgttcggccaggggaccaaggtggaaatcaaacgaacggtggctgcaccatctgtcttcatcttcccgccatctgatgagcagttgaaatctggaactgcctctgttgtgtgcctgctgaataacttctatcccagagaggccaaagtacagtggaaggtggataacgccctccaatcgggtaactcccaggagagtgtcacagagcaggacagcaaggacagcacctacagcctcagcagcaccctgacgctgagcaaagcagactacgagaaacacaaagtctacgcctgcgaagtcacccatcagggcctgagctcgcccgtcacaaagagcttcaacaggggagagtgttag

SEQ ID NO: 2303 - protein, 215 aa, synthetic construct
  REGION 1..215: note = Synthetic
EIVMTQSPATLSVSPGERATLSCRASQSVNANLAWYQQKPGQAPRLLIYGASTRATGIPARFSGSGSGTEFTLTISSLQSEDFAVYYCQQFYNWPPYTFGQGTKVEIKRTVAAPSVFIFPPSDEQLKSGTASVVCLLNNFYPREAKVQWKVDNALQSGNSQESVTEQDSKDSTYSLSSTLTLSKADYEKHKVYACEVTHQGLSSPVTKSFNRGEC

SEQ ID NO: 2304 - DNA, 714 bp, synthetic construct
  misc_feature 1..714: note = Synthetic
  source 1..714: mol_type = other DNA
atggacatgagggtgcccgctcagctcctggggctcctgctgctgtggctgagaggtgcgcgctgtgaaatcgtgatgacgcagtctccagccaccctgtctgtgtctccaggggaaagagccaccctctcctgcagggccagtcagagtgttaacgctaacttagcctggtaccagcagaaacctggccaagctcccaggctcctcatctatggtgcatccaccagggccactggtatcccagccaggttcagtggcagtgggtctgggacagagttcactctcaccatcagcagcctgcagtctgaagattttgcagtttattactgtcagcagttttataactggcctccgtatacgttcggccaggggaccaaggtggaaatcaaacgaacggtggctgcaccatctgtcttcatcttcccgccatctgatgagcagttgaaatctggaactgcctctgttgtgtgcctgctgaataacttctatcccagagaggccaaagtacagtggaaggtggataacgccctccaatcgggtaactcccaggagagtgtcacagagcaggacagcaaggacagcacctacagcctcagcagcaccctgacgctgagcaaagcagactacgagaaacacaaagtctacgcctgcgaagtcacccatcagggcctgagctcgcccgtcacaaagagcttcaacaggggagagtgttag

SEQ ID NO: 2305 - protein, 215 aa, synthetic construct
  REGION 1..215: note = Synthetic
EIVMTQSPATLSVSPGERATLSCRASQSVNANLAWYQQKPGQAPRLLIYGASTRATGIPARFSGSGSGTEFTLTISSLQSEDFAVYYCQQFYNWPPHTFGQGTKVEIKRTVAAPSVFIFPPSDEQLKSGTASVVCLLNNFYPREAKVQWKVDNALQSGNSQESVTEQDSKDSTYSLSSTLTLSKADYEKHKVYACEVTHQGLSSPVTKSFNRGEC

SEQ ID NO: 2306 - DNA, 714 bp, synthetic construct
  misc_feature 1..714: note = Synthetic
  source 1..714: mol_type = other DNA
atggacatgagggtgcccgctcagctcctggggctcctgctgctgtggctgagaggtgcgcgctgtgaaatcgtgatgacgcagtctccagccaccctgtctgtgtctccaggggaaagagccaccctctcctgcagggccagtcagagtgttaacgctaacttagcctggtaccagcagaaacctggccaagctcccaggctcctcatctatggtgcatccaccagggccactggtatcccagccaggttcagtggcagtgggtctgggacagagttcactctcaccatcagcagcctgcagtctgaagattttgcagtttattactgtcagcagttttataactggcctccgcatacgttcggccaggggaccaaggtggaaatcaaacgaacggtggctgcaccatctgtcttcatcttcccgccatctgatgagcagttgaaatctggaactgcctctgttgtgtgcctgctgaataacttctatcccagagaggccaaagtacagtggaaggtggataacgccctccaatcgggtaactcccaggagagtgtcacagagcaggacagcaaggacagcacctacagcctcagcagcaccctgacgctgagcaaagcagactacgagaaacacaaagtctacgcctgcgaagtcacccatcagggcctgagctcgcccgtcacaaagagcttcaacaggggagagtgttag

SEQ ID NO: 2307 - protein, 215 aa, synthetic construct
  REGION 1..215: note = Synthetic
EIVMTQSPATLSVSPGERATLSCRASQSVNANLAWYQQKPGQAPRLLIYGASTRATGIPARFSGSGSGTEFTLTISSLQSEDFAVYYCQQFYNFPPYTFGQGTKVEIKRTVAAPSVFIFPPSDEQLKSGTASVVCLLNNFYPREAKVQWKVDNALQSGNSQESVTEQDSKDSTYSLSSTLTLSKADYEKHKVYACEVTHQGLSSPVTKSFNRGEC

SEQ ID NO: 2308 - DNA, 714 bp, synthetic construct
  misc_feature 1..714: note = Synthetic
  source 1..714: mol_type = other DNA
atggacatgagggtgcccgctcagctcctggggctcctgctgctgtggctgagaggtgcgcgctgtgaaatcgtgatgacgcagtctccagccaccctgtctgtgtctccaggggaaagagccaccctctcctgcagggccagtcagagtgttaacgctaacttagcctggtaccagcagaaacctggccaagctcccaggctcctcatctatggtgcatccaccagggccactggtatcccagccaggttcagtggcagtgggtctgggacagagttcactctcaccatcagcagcctgcagtctgaagattttgcagtttattactgtcagcagttttataactttcctccgtatacgttcggccaggggaccaaggtggaaatcaaacgaacggtggctgcaccatctgtcttcatcttcccgccatctgatgagcagttgaaatctggaactgcctctgttgtgtgcctgctgaataacttctatcccagagaggccaaagtacagtggaaggtggataacgccctccaatcgggtaactcccaggagagtgtcacagagcaggacagcaaggacagcacctacagcctcagcagcaccctgacgctgagcaaagcagactacgagaaacacaaagtctacgcctgcgaagtcacccatcagggcctgagctcgcccgtcacaaagagcttcaacaggggagagtgttag

SEQ ID NO: 2309 - protein, 215 aa, synthetic construct
  REGION 1..215: note = Synthetic
EIVMTQSPATLSVSPGERATLSCRASQSVNANLAWYQQKPGQAPRLLIYGASTRATGIPARFSGSGSGTEFTLTISSLQSEDFAVYYCQQFYNFPPHTFGQGTKVEIKRTVAAPSVFIFPPSDEQLKSGTASVVCLLNNFYPREAKVQWKVDNALQSGNSQESVTEQDSKDSTYSLSSTLTLSKADYEKHKVYACEVTHQGLSSPVTKSFNRGEC

SEQ ID NO: 2310 - DNA, 714 bp, synthetic construct
  misc_feature 1..714: note = Synthetic
  source 1..714: mol_type = other DNA
atggacatgagggtgcccgctcagctcctggggctcctgctgctgtggctgagaggtgcgcgctgtgaaatcgtgatgacgcagtctccagccaccctgtctgtgtctccaggggaaagagccaccctctcctgcagggccagtcagagtgttaacgctaacttagcctggtaccagcagaaacctggccaagctcccaggctcctcatctatggtgcatccaccagggccactggtatcccagccaggttcagtggcagtgggtctgggacagagttcactctcaccatcagcagcctgcagtctgaagattttgcagtttattactgtcagcagttttataactttcctccgcatacgttcggccaggggaccaaggtggaaatcaaacgaacggtggctgcaccatctgtcttcatcttcccgccatctgatgagcagttgaaatctggaactgcctctgttgtgtgcctgctgaataacttctatcccagagaggccaaagtacagtggaaggtggataacgccctccaatcgggtaactcccaggagagtgtcacagagcaggacagcaaggacagcacctacagcctcagcagcaccctgacgctgagcaaagcagactacgagaaacacaaagtctacgcctgcgaagtcacccatcagggcctgagctcgcccgtcacaaagagcttcaacaggggagagtgttag

SEQ ID NO: 2311 - protein, 215 aa, synthetic construct; identical to SEQ ID NO: 2285
  REGION 1..215: note = Synthetic

SEQ ID NO: 2312 - DNA, 714 bp, synthetic construct; identical to SEQ ID NO: 2286
  misc_feature 1..714: note = Synthetic
  source 1..714: mol_type = other DNA

SEQ ID NO: 2313 - protein, 215 aa, synthetic construct
  REGION 1..215: note = Synthetic
EIVMTQSPATLSVSPGERATLSCRASQSVNHNLAWYQQKPGQAPRLLIYGASTRATGIPARFSGSGSGTEFTLTISSLQSEDFAVYYCQQFYNFPPWTFGQGTKVEIKRTVAAPSVFIFPPSDEQLKSGTASVVCLLNNFYPREAKVQWKVDNALQSGNSQESVTEQDSKDSTYSLSSTLTLSKADYEKHKVYACEVTHQGLSSPVTKSFNRGEC

SEQ ID NO: 2314 - DNA, 714 bp, synthetic construct
  misc_feature 1..714: note = Synthetic
  source 1..714: mol_type = other DNA
atggacatgagggtgcccgctcagctcctggggctcctgctgctgtggctgagaggtgcgcgctgtgaaatcgtgatgacgcagtctccagccaccctgtctgtgtctccaggggaaagagccaccctctcctgcagggccagtcagagtgttaaccataacttagcctggtaccagcagaaacctggccaagctcccaggctcctcatctatggtgcatccaccagggccactggtatcccagccaggttcagtggcagtgggtctgggacagagttcactctcaccatcagcagcctgcagtctgaagattttgcagtttattactgtcagcagttttataactttcctccgtggacgttcggccaggggaccaaggtggaaatcaaacgaacggtggctgcaccatctgtcttcatcttcccgccatctgatgagcagttgaaatctggaactgcctctgttgtgtgcctgctgaataacttctatcccagagaggccaaagtacagtggaaggtggataacgccctccaatcgggtaactcccaggagagtgtcacagagcaggacagcaaggacagcacctacagcctcagcagcaccctgacgctgagcaaagcagactacgagaaacacaaagtctacgcctgcgaagtcacccatcagggcctgagctcgcccgtcacaaagagcttcaacaggggagagtgttag

SEQ ID NO: 2315 - protein, 215 aa, synthetic construct
  REGION 1..215: note = Synthetic
EIVMTQSPATLSVSPGERATLSCRASQSVNHNLAWYQQKPGQAPRLLIYGASTRATGIPARFSGSGSGTEFTLTISSLQSEDFAVYYCQQFYNWPPNTFGQGTKVEIKRTVAAPSVFIFPPSDEQLKSGTASVVCLLNNFYPREAKVQWKVDNALQSGNSQESVTEQDSKDSTYSLSSTLTLSKADYEKHKVYACEVTHQGLSSPVTKSFNRGEC

SEQ ID NO: 2316 - DNA, 714 bp, synthetic construct
  misc_feature 1..714: note = Synthetic
  source 1..714: mol_type = other DNA
atggacatgagggtgcccgctcagctcctggggctcctgctgctgtggctgagaggtgcgcgctgtgaaatcgtgatgacgcagtctccagccaccctgtctgtgtctccaggggaaagagccaccctctcctgcagggccagtcagagtgttaaccataacttagcctggtaccagcagaaacctggccaagctcccaggctcctcatctatggtgcatccaccagggccactggtatcccagccaggttcagtggcagtgggtctgggacagagttcactctcaccatcagcagcctgcagtctgaagattttgcagtttattactgtcagcagttttataactggcctccgaatacgttcggccaggggaccaaggtggaaatcaaacgaacggtggctgcaccatctgtcttcatcttcccgccatctgatgagcagttgaaatctggaactgcctctgttgtgtgcctgctgaataacttctatcccagagaggccaaagtacagtggaaggtggataacgccctccaatcgggtaactcccaggagagtgtcacagagcaggacagcaaggacagcacctacagcctcagcagcaccctgacgctgagcaaagcagactacgagaaacacaaagtctacgcctgcgaagtcacccatcagggcctgagctcgcccgtcacaaagagcttcaacaggggagagtgttag

SEQ ID NO: 2317 - protein, 215 aa, synthetic construct
  REGION 1..215: note = Synthetic
EIVMTQSPATLSVSPGERATLSCRASQSVNHNLAWYQQKPGQAPRLLIYGASTRATGIPARFSGSGSGTEFTLTISSLQSEDFAVYYCQQFYNWPPYTFGQGTKVEIKRTVAAPSVFIFPPSDEQLKSGTASVVCLLNNFYPREAKVQWKVDNALQSGNSQESVTEQDSKDSTYSLSSTLTLSKADYEKHKVYACEVTHQGLSSPVTKSFNRGEC

SEQ ID NO: 2318 - DNA, 714 bp, synthetic construct
  misc_feature 1..714: note = Synthetic
  source 1..714: mol_type = other DNA
atggacatgagggtgcccgctcagctcctggggctcctgctgctgtggctgagaggtgcgcgctgtgaaatcgtgatgacgcagtctccagccaccctgtctgtgtctccaggggaaagagccaccctctcctgcagggccagtcagagtgttaaccataacttagcctggtaccagcagaaacctggccaagctcccaggctcctcatctatggtgcatccaccagggccactggtatcccagccaggttcagtggcagtgggtctgggacagagttcactctcaccatcagcagcctgcagtctgaagattttgcagtttattactgtcagcagttttataactggcctccgtatacgttcggccaggggaccaaggtggaaatcaaacgaacggtggctgcaccatctgtcttcatcttcccgccatctgatgagcagttgaaatctggaactgcctctgttgtgtgcctgctgaataacttctatcccagagaggccaaagtacagtggaaggtggataacgccctccaatcgggtaactcccaggagagtgtcacagagcaggacagcaaggacagcacctacagcctcagcagcaccctgacgctgagcaaagcagactacgagaaacacaaagtctacgcctgcgaagtcacccatcagggcctgagctcgcccgtcacaaagagcttcaacaggggagagtgttag

SEQ ID NO: 2319 - protein, 215 aa, synthetic construct
  REGION 1..215: note = Synthetic
EIVMTQSPATLSVSPGERATLSCRASQSVNHNLAWYQQKPGQAPRLLIYGASTRATGIPARFSGSGSGTEFTLTISSLQSEDFAVYYCQQFYNFPPNTFGQGTKVEIKRTVAAPSVFIFPPSDEQLKSGTASVVCLLNNFYPREAKVQWKVDNALQSGNSQESVTEQDSKDSTYSLSSTLTLSKADYEKHKVYACEVTHQGLSSPVTKSFNRGEC

SEQ ID NO: 2320 - DNA, 714 bp, synthetic construct
  misc_feature 1..714: note = Synthetic
  source 1..714: mol_type = other DNA
atggacatgagggtgcccgctcagctcctggggctcctgctgctgtggctgagaggtgcgcgctgtgaaatcgtgatgacgcagtctccagccaccctgtctgtgtctccaggggaaagagccaccctctcctgcagggccagtcagagtgttaaccataacttagcctggtaccagcagaaacctggccaagctcccaggctcctcatctatggtgcatccaccagggccactggtatcccagccaggttcagtggcagtgggtctgggacagagttcactctcaccatcagcagcctgcagtctgaagattttgcagtttattactgtcagcagttttataactttcctccgaatacgttcggccaggggaccaaggtggaaatcaaacgaacggtggctgcaccatctgtcttcatcttcccgccatctgatgagcagttgaaatctggaactgcctctgttgtgtgcctgctgaataacttctatcccagagaggccaaagtacagtggaaggtggataacgccctccaatcgggtaactcccaggagagtgtcacagagcaggacagcaaggacagcacctacagcctcagcagcaccctgacgctgagcaaagcagactacgagaaacacaaagtctacgcctgcgaagtcacccatcagggcctgagctcgcccgtcacaaagagcttcaacaggggagagtgttag

SEQ ID NO: 2321 - protein, 215 aa, synthetic construct
  REGION 1..215: note = Synthetic
EIVMTQSPATLSVSPGERATLSCRASQSVNHNLAWYQQKPGQAPRLLIYGASTRATGIPARFSGSGSGTEFTLTISSLQSEDFAVYYCQQFYNFPPYTFGQGTKVEIKRTVAAPSVFIFPPSDEQLKSGTASVVCLLNNFYPREAKVQWKVDNALQSGNSQESVTEQDSKDSTYSLSSTLTLSKADYEKHKVYACEVTHQGLSSPVTKSFNRGEC

SEQ ID NO: 2322 - DNA, 714 bp, synthetic construct
  misc_feature 1..714: note = Synthetic
  source 1..714: mol_type = other DNA
atggacatgagggtgcccgctcagctcctggggctcctgctgctgtggctgagaggtgcgcgctgtgaaatcgtgatgacgcagtctccagccaccctgtctgtgtctccaggggaaagagccaccctctcctgcagggccagtcagagtgttaaccataacttagcctggtaccagcagaaacctggccaagctcccaggctcctcatctatggtgcatccaccagggccactggtatcccagccaggttcagtggcagtgggtctgggacagagttcactctcaccatcagcagcctgcagtctgaagattttgcagtttattactgtcagcagttttataactttcctccgtatacgttcggccaggggaccaaggtggaaatcaaacgaacggtggctgcaccatctgtcttcatcttcccgccatctgatgagcagttgaaatctggaactgcctctgttgtgtgcctgctgaataacttctatcccagagaggccaaagtacagtggaaggtggataacgccctccaatcgggtaactcccaggagagtgtcacagagcaggacagcaaggacagcacctacagcctcagcagcaccctgacgctgagcaaagcagactacgagaaacacaaagtctacgcctgcgaagtcacccatcagggcctgagctcgcccgtcacaaagagcttcaacaggggagagtgttag

SEQ ID NO: 2323 - protein, 214 aa, synthetic construct
  REGION 1..214: note = Synthetic
EIVMTQSPATLSVSPGERATLSCRASQSVSSNLAWYQQKSGQAPRLLIYGASIRATGIPARFSGSGSGTEFTFTISSLQSEDFAVYYCQQYKNWPLTFGGGTKVEIKRTVAAPSVFIFPPSDEQLKSGTASVVCLLNNFYPREAKVQWKVDNALQSGNSQESVTEQDSKDSTYSLSSTLTLSKADYEKHKVYACEVTHQGLSSPVTKSFNRGEC

SEQ ID NO: 2324 - DNA, 711 bp, synthetic construct
  misc_feature 1..711: note = Synthetic
  source 1..711: mol_type = other DNA
atggacatgagggtgcccgctcagctcctggggctcctgctgctgtggctgagaggtgcgcgctgtgaaatcgtgatgacgcagtctccagccaccctgtctgtgtctccaggggaaagagccaccctctcctgcagggccagtcagagtgttagcagcaacttagcctggtatcagcagaaatctggccaggctcccaggctcctcatctatggtgcatccatcagggccactggtatcccagccaggtttagcggcagtgggtctgggacagagttcaccttcactatcagcagcctgcagtctgaagattttgcagtctattactgtcagcagtataagaactggcctctcactttcggcggagggaccaaggtggagatcaaacgaacggtggctgcaccatctgtcttcatcttcccgccatctgatgagcagttgaaatctggaactgcctctgttgtgtgcctgctgaataacttctatcccagagaggccaaagtacagtggaaggtggataacgccctccaatcgggtaactcccaggagagtgtcacagagcaggacagcaaggacagcacctacagcctcagcagcaccctgacgctgagcaaagcagactacgagaaacacaaagtctacgcctgcgaagtcacccatcagggcctgagctcgcccgtcacaaagagcttcaacaggggagagtgttag

SEQ ID NO: 2325 - protein, 214 aa, synthetic construct
  REGION 1..214: note = Synthetic
EIVMTQSPATLSVSPGERATLSCRASQSVSSNLAWYQQKPGQAPRLLIYGASIRATGIPARFSGSGSGTEFTFTISSLQSEDFAVYYCQQYKNWPLTFGGGTKVEIKRTVAAPSVFIFPPSDEQLKSGTASVVCLLNNFYPREAKVQWKVDNALQSGNSQESVTEQDSKDSTYSLSSTLTLSKADYEKHKVYACEVTHQGLSSPVTKSFNRGEC

SEQ ID NO: 2326 - DNA, 711 bp, synthetic construct
  misc_feature 1..711: note = Synthetic
  source 1..711: mol_type = other DNA
atggacatgagggtgcccgctcagctcctggggctcctgctgctgtggctgagaggtgcgcgctgtgaaatcgtgatgacgcagtctccagccaccctgtctgtgtctccaggggaaagagccaccctctcctgcagggccagtcagagtgttagcagcaacttagcctggtatcagcagaaacctggccaggctcccaggctcctcatctatggtgcatccatcagggccactggtatcccagccaggtttagcggcagtgggtctgggacagagttcaccttcactatcagcagcctgcagtctgaagattttgcagtctattactgtcagcagtataagaactggcctctcactttcggcggagggaccaaggtggagatcaaacgaacggtggctgcaccatctgtcttcatcttcccgccatctgatgagcagttgaaatctggaactgcctctgttgtgtgcctgctgaataacttctatcccagagaggccaaagtacagtggaaggtggataacgccctccaatcgggtaactcccaggagagtgtcacagagcaggacagcaaggacagcacctacagcctcagcagcaccctgacgctgagcaaagcagactacgagaaacacaaagtctacgcctgcgaagtcacccatcagggcctgagctcgcccgtcacaaagagcttcaacaggggagagtgttag

SEQ ID NO: 2327 - protein, 214 aa, synthetic construct
  REGION 1..214: note = Synthetic
EIVMTQSPATLSVSPGERATLSCRASQSVSSNLAWYQQKSGQAPRLLIYGASIRATGIPARFSGSGSGTEFTLTISSLQSEDFAVYYCQQYKNWPLTFGGGTKVEIKRTVAAPSVFIFPPSDEQLKSGTASVVCLLNNFYPREAKVQWKVDNALQSGNSQESVTEQDSKDSTYSLSSTLTLSKADYEKHKVYACEVTHQGLSSPVTKSFNRGEC

SEQ ID NO: 2328 - DNA, 711 bp, synthetic construct
  misc_feature 1..711: note = Synthetic
  source 1..711: mol_type = other DNA
atggacatgagggtgcccgctcagctcctggggctcctgctgctgtggctgagaggtgcgcgctgtgaaatcgtgatgacgcagtctccagccaccctgtctgtgtctccaggggaaagagccaccctctcctgcagggccagtcagagtgttagcagcaacttagcctggtatcagcagaaatctggccaggctcccaggctcctcatctatggtgcatccatcagggccactggtatcccagccaggtttagcggcagtgggtctgggacagagttcacccttactatcagcagcctgcagtctgaagattttgcagtctattactgtcagcagtataagaactggcctctcactttcggcggagggaccaaggtggagatcaaacgaacggtggctgcaccatctgtcttcatcttcccgccatctgatgagcagttgaaatctggaactgcctctgttgtgtgcctgctgaataacttctatcccagagaggccaaagtacagtggaaggtggataacgccctccaatcgggtaactcccaggagagtgtcacagagcaggacagcaaggacagcacctacagcctcagcagcaccctgacgctgagcaaagcagactacgagaaacacaaagtctacgcctgcgaagtcacccatcagggcctgagctcgcccgtcacaaagagcttcaacaggggagagtgttag

SEQ ID NO: 2329 - protein, 214 aa, synthetic construct; identical to SEQ ID NO: 2323
  REGION 1..214: note = Synthetic

SEQ ID NO: 2330 - DNA, 711 bp, synthetic construct; identical to SEQ ID NO: 2324
  misc_feature 1..711: note = Synthetic
  source 1..711: mol_type = other DNA

SEQ ID NO: 2331 - protein, 214 aa, synthetic construct
  REGION 1..214: note = Synthetic
EIVMTQSPATLSVSPGERATLSCRASQSVSSNLAWYQQKSGQAPRLLIYGASIRATGIPARFSGSGSGTEFTFTISSLQSEDFAVYYCQQYKNFPLTFGGGTKVEIKRTVAAPSVFIFPPSDEQLKSGTASVVCLLNNFYPREAKVQWKVDNALQSGNSQESVTEQDSKDSTYSLSSTLTLSKADYEKHKVYACEVTHQGLSSPVTKSFNRGEC

SEQ ID NO: 2332 - DNA, 711 bp, synthetic construct
  misc_feature 1..711: note = Synthetic
  source 1..711: mol_type = other DNA
atggacatgagggtgcccgctcagctcctggggctcctgctgctgtggctgagaggtgcgcgctgtgaaatcgtgatgacgcagtctccagccaccctgtctgtgtctccaggggaaagagccaccctctcctgcagggccagtcagagtgttagcagcaacttagcctggtatcagcagaaatctggccaggctcccaggctcctcatctatggtgcatccatcagggccactggtatcccagccaggtttagcggcagtgggtctgggacagagttcaccttcactatcagcagcctgcagtctgaagattttgcagtctattactgtcagcagtataagaactttcctctcactttcggcggagggaccaaggtggagatcaaacgaacggtggctgcaccatctgtcttcatcttcccgccatctgatgagcagttgaaatctggaactgcctctgttgtgtgcctgctgaataacttctatcccagagaggccaaagtacagtggaaggtggataacgccctccaatcgggtaactcccaggagagtgtcacagagcaggacagcaaggacagcacctacagcctcagcagcaccctgacgctgagcaaagcagactacgagaaacacaaagtctacgcctgcgaagtcacccatcagggcctgagctcgcccgtcacaaagagcttcaacaggggagagtgttag

SEQ ID NO: 2333 - protein, 214 aa, synthetic construct; identical to SEQ ID NO: 2323
  REGION 1..214: note = Synthetic

SEQ ID NO: 2334 - DNA, 711 bp, synthetic construct; identical to SEQ ID NO: 2324
  misc_feature 1..711: note = Synthetic
  source 1..711: mol_type = other DNA

SEQ ID NO: 2335 - protein, 214 aa, synthetic construct; identical to SEQ ID NO: 2323
  REGION 1..214: note = Synthetic

SEQ ID NO: 2336 - DNA, 711 bp, synthetic construct; identical to SEQ ID NO: 2324
  misc_feature 1..711: note = Synthetic
  source 1..711: mol_type = other DNA

SEQ ID NO: 2337 - protein, 214 aa, synthetic construct; identical to SEQ ID NO: 2323
  REGION 1..214: note = Synthetic

SEQ ID NO: 2338 - DNA, 711 bp, synthetic construct; identical to SEQ ID NO: 2324
  misc_feature 1..711: note = Synthetic
  source 1..711: mol_type = other DNA

SEQ ID NO: 2339 - protein, 214 aa, synthetic construct; identical to SEQ ID NO: 2323
  REGION 1..214: note = Synthetic

SEQ ID NO: 2340 - DNA, 711 bp, synthetic construct; identical to SEQ ID NO: 2324
  misc_feature 1..711: note = Synthetic
  source 1..711: mol_type = other DNA

SEQ ID NO: 2341 - protein, 214 aa, synthetic construct; identical to SEQ ID NO: 2327
  REGION 1..214: note = Synthetic

SEQ ID NO: 2342 - DNA, 711 bp, synthetic construct; identical to SEQ ID NO: 2328
  misc_feature 1..711: note = Synthetic
  source 1..711: mol_type = other DNA

SEQ ID NO: 2343 - protein, 214 aa, synthetic construct
  REGION 1..214: note = Synthetic
EIVMTQSPATLSVSPGERATLSCRASQSVSSNLAWYQQKSGQAPRLLIYGASIRATGIPARFSGSGSGTEFTLTISSLQSEDFAVYYCQQYKNFPLTFGGGTKVEIKRTVAAPSVFIFPPSDEQLKSGTASVVCLLNNFYPREAKVQWKVDNALQSGNSQESVTEQDSKDSTYSLSSTLTLSKADYEKHKVYACEVTHQGLSSPVTKSFNRGEC

SEQ ID NO: 2344 - DNA, 711 bp, synthetic construct
  misc_feature 1..711: note = Synthetic
  source 1..711: mol_type = other DNA
atggacatgagggtgcccgctcagctcctggggctcctgctgctgtggctgagaggtgcgcgctgtgaaatcgtgatgacgcagtctccagccaccctgtctgtgtctccaggggaaagagccaccctctcctgcagggccagtcagagtgttagcagcaacttagcctggtatcagcagaaatctggccaggctcccaggctcctcatctatggtgcatccatcagggccactggtatcccagccaggtttagcggcagtgggtctgggacagagttcacccttactatcagcagcctgcagtctgaagattttgcagtctattactgtcagcagtataagaactttcctctcactttcggcggagggaccaaggtggagatcaaacgaacggtggctgcaccatctgtcttcatcttcccgccatctgatgagcagttgaaatctggaactgcctctgttgtgtgcctgctgaataacttctatcccagagaggccaaagtacagtggaaggtggataacgccctccaatcgggtaactcccaggagagtgtcacagagcaggacagcaaggacagcacctacagcctcagcagcaccctgacgctgagcaaagcagactacgagaaacacaaagtctacgcctgcgaagtcacccatcagggcctgagctcgcccgtcacaaagagcttcaacaggggagagtgttag

SEQ ID NO: 2345 - protein, 214 aa, synthetic construct
  REGION 1..214: note = Synthetic
EIVMTQSPATLSVSPGERATLSCRASQSVSSNLAWYQQKPGQAPRLLIYGASIRATGIPARFSGSGSGTEFTLTISSLQSEDFAVYYCQQYKNWPLTFGGGTKVEIKRTVAAPSVFIFPPSDEQLKSGTASVVCLLNNFYPREAKVQWKVDNALQSGNSQESVTEQDSKDSTYSLSSTLTLSKADYEKHKVYACEVTHQGLSSPVTKSFNRGEC

SEQ ID NO: 2346 - DNA, 711 bp, synthetic construct
  misc_feature 1..711: note = Synthetic
  source 1..711: mol_type = other DNA
atggacatgagggtgcccgctcagctcctggggctcctgctgctgtggctgagaggtgcgcgctgtgaaatcgtgatgacgcagtctccagccaccctgtctgtgtctccaggggaaagagccaccctctcctgcagggccagtcagagtgttagcagcaacttagcctggtatcagcagaaacctggccaggctcccaggctcctcatctatggtgcatccatcagggccactggtatcccagccaggtttagcggcagtgggtctgggacagagttcacccttactatcagcagcctgcagtctgaagattttgcagtctattactgtcagcagtataagaactggcctctcactttcggcggagggaccaaggtggagatcaaacgaacggtggctgcaccatctgtcttcatcttcccgccatctgatgagcagttgaaatctggaactgcctctgttgtgtgcctgctgaataacttctatcccagagaggccaaagtacagtggaaggtggataacgccctccaatcgggtaactcccaggagagtgtcacagagcaggacagcaaggacagcacctacagcctcagcagcaccctgacgctgagcaaagcagactacgagaaacacaaagtctacgcctgcgaagtcacccatcagggcctgagctcgcccgtcacaaagagcttcaacaggggagagtgttag

SEQ ID NO: 2347 - protein, 214 aa, synthetic construct
  REGION 1..214: note = Synthetic
EIVMTQSPATLSVSPGERATLSCRASQSVSSNLAWYQQKPGQAPRLLIYGASIRATGIPARFSGSGSGTEFTLTISSLQSEDFAVYYCQQYKNFPLTFGGGTKVEIKRTVAAPSVFIFPPSDEQLKSGTASVVCLLNNFYPREAKVQWKVDNALQSGNSQESVTEQDSKDSTYSLSSTLTLSKADYEKHKVYACEVTHQGLSSPVTKSFNRGEC

SEQ ID NO: 2348 - DNA, 711 bp, synthetic construct
  misc_feature 1..711: note = Synthetic
  source 1..711: mol_type = other DNA
atggacatgagggtgcccgctcagctcctggggctcctgctgctgtggctgagaggtgcgcgctgtgaaatcgtgatgacgcagtctccagccaccctgtctgtgtctccaggggaaagagccaccctctcctgcagggccagtcagagtgttagcagcaacttagcctggtatcagcagaaacctggccaggctcccaggctcctcatctatggtgcatccatcagggccactggtatcccagccaggtttagcggcagtgggtctgggacagagttcacccttactatcagcagcctgcagtctgaagattttgcagtctattactgtcagcagtataagaactttcctctcactttcggcggagggaccaaggtggagatcaaacgaacggtggctgcaccatctgtcttcatcttcccgccatctgatgagcagttgaaatctggaactgcctctgttgtgtgcctgctgaataacttctatcccagagaggccaaagtacagtggaaggtggataacgccctccaatcgggtaactcccaggagagtgtcacagagcaggacagcaaggacagcacctacagcctcagcagcaccctgacgctgagcaaagcagactacgagaaacacaaagtctacgcctgcgaagtcacccatcagggcctgagctcgcccgtcacaaagagcttcaacaggggagagtgttag

SEQ ID NO: 2349 - protein, 214 aa, synthetic construct; identical to SEQ ID NO: 2345
  REGION 1..214: note = Synthetic

SEQ ID NO: 2350 - DNA, 711 bp, synthetic construct; identical to SEQ ID NO: 2346
  misc_feature 1..711: note = Synthetic
  source 1..711: mol_type = other DNA

SEQ ID NO: 2351 - protein, 214 aa, synthetic construct; identical to SEQ ID NO: 2327
  REGION 1..214: note = Synthetic

SEQ ID NO: 2352 - DNA, 711 bp, synthetic construct; identical to SEQ ID NO: 2328
  misc_feature 1..711: note = Synthetic
  source 1..711: mol_type = other DNA

SEQ ID NO: 2353 - protein, 214 aa, synthetic construct; identical to SEQ ID NO: 2347
  REGION 1..214: note = Synthetic

SEQ ID NO: 2354 - DNA, 711 bp, synthetic construct; identical to SEQ ID NO: 2348
  misc_feature 1..711: note = Synthetic
  source 1..711: mol_type = other DNA

SEQ ID NO: 2355 - protein, 214 aa, synthetic construct; identical to SEQ ID NO: 2343
  REGION 1..214: note = Synthetic

SEQ ID NO: 2356 - DNA, 711 bp, synthetic construct; identical to SEQ ID NO: 2344
  misc_feature 1..711: note = Synthetic
  source 1..711: mol_type = other DNA

SEQ ID NO: 2357 - protein, 214 aa, synthetic construct
  REGION 1..214: note = Synthetic
EIVMTQSPATLSVSPGERATLSCRASQSVSSNLAWYQQKSGQAPRLLIYGASIRATGIPARVSGSGSGTEFTFTISSLQSEDFAVYYCQQYKNWPLTFGGGTKVEIKRTVAAPSVFIFPPSDEQLKSGTASVVCLLNNFYPREAKVQWKVDNALQSGNSQESVTEQDSKDSTYSLSSTLTLSKADYEKHKVYACEVTHQGLSSPVTKSFNRGEC

SEQ ID NO: 2358 - DNA, 711 bp, synthetic construct; identical to SEQ ID NO: 352
  misc_feature 1..711: note = Synthetic
  source 1..711: mol_type = other DNA

SEQ ID NO: 2359 - protein, 622 aa, synthetic construct
  REGION 1..622: note = Synthetic
QVQLVQSGAEVTKPGASVKVSCKASGYTFTRYDINWVRQATGQGLEWMGWMNPNSGNSGSVQKFRGRVTMTRDTSITTVYMELSSLRSDDTAVYYCARGGISSSWHWAFDIWGQGTMVTVSSASTKGPSVFPLAPSSKSTSGGTAALGCLVKDYFPEPVTVSWNSGALTSGVHTFPAVLQSSGLYSLSSVVTVPSSSLGTQTYICNVNHKPSNTKVDKKVEPKSCDKTHTCPPCPAPELLGGPSVFLFPPKPKDTLMISRTPEVTCVVVDVSHEDPEVKFNWYVDGVEVHNAKTKPCEEQYGSTYRCVSVLTVLHQDWLNGKEYKCKVSNKALPAPIEKTISKAKGQPREPQVYTLPPSREEMTKNQVSLTCLVKGFYPSDIAVEWESNGQPENNYKTTPPVLDSDGSFFLYSKLTVDKSRWQQGNVFSCSVMHEALHNHYTQKSLSLSPGGGGGSSPGQGTQSENSCTQFPGNLPNMLRDLRDAFSRVKTFFEMKDQLDNLLLKESLLEDFKGYLGCQALSEMIQFYLEEVMPQAENQDPDIKAHVNSLGENLKTLRLRLRRCHRFLPCENGGGSGGKSKAVEQVKNAFNKLQEKGIYKAMSEFDIFINYIEAYMTMKIRN

SEQ ID NO: 2360 - protein, 166 aa, synthetic construct
  REGION 1..166: note = Synthetic
SPGQGTQSENSCTQFPGNLPNMLRDLRDAFSRVKTFFEMKDQLDNLLLKESLLEDFKGYLGCQALSEMIQFYLEEVMPQAENQDPDIKAHVNSLGENLKTLRLRLRRCHRFLPCENGGGSGGKSKAVEQVKNAFNKLQEKGIYKAMSEFDIFINYIEAYMTMKIRN

SEQ ID NO: 2361 - protein, 622 aa, synthetic construct
  REGION 1..622: note = Synthetic
QVQLVQSGAEVTKPGASVKVSCKASGYTFTRYDINWVRQATGQGLEWMGWMNPNSGNSGSVQKFRGRVTMTRDTSITTVYMELSSLRSDDTAVYYCARGGISSSWHWAFDIWGQGTMVTVSSASTKGPSVFPLAPSSKSTSGGTAALGCLVKDYFPEPVTVSWNSGALTSGVHTFPAVLQSSGLYSLSSVVTVPSSSLGTQTYICNVNHKPSNTKVDKKVEPKSCDKTHTCPPCPAPELLGGPSVFLFPPKPKDTLMISRTPEVTCVVVDVSHEDPEVKFNWYVDGVEVHNAKTKPCEEQYGSTYRCVSVLTVLHQDWLNGKEYKCKVSNKALPAPIEKTISKAKGQPREPQVYTLPPSREEMTKNQVSLTCLVKGFYPSDIAVEWESNGQPENNYKTTPPVLDSDGSFFLYSKLTVDKSRWQQGNVFSCSVMHEALHNHYTQKSLSLSPGGGGGSSPGQGTQSENSCTQFPGNLPNMLRDLRDAFSRVKTFFQMKDQLDNLLLKESLLEDFKGYLGCQALSEMIQFYLEEVMPQAENQDPDIKAHVNSLGENLKTLRLRLRRCHRFLPCENGGGSGGKSKAVEQVKNAFNKLQEKGIYKAMSEFDIFINYIEAYMTMKIRN

SEQ ID NO: 2362 - protein, 166 aa, synthetic construct
  REGION 1..166: note = Synthetic
SPGQGTQSENSCTQFPGNLPNMLRDLRDAFSRVKTFFQMKDQLDNLLLKESLLEDFKGYLGCQALSEMIQFYLEEVMPQAENQDPDIKAHVNSLGENLKTLRLRLRRCHRFLPCENGGGSGGKSKAVEQVKNAFNKLQEKGIYKAMSEFDIFINYIEAYMTMKIRN

SEQ ID NO: 2363 - protein, 622 aa, synthetic construct
  REGION 1..622: note = Synthetic
QVQLVQSGAEVTKPGASVKVSCKASGYTFTRYDINWVRQATGQGLEWMGWMNPNSGNSGSVQKFRGRVTMTRDTSITTVYMELSSLRSDDTAVYYCARGGISSSWHWAFDIWGQGTMVTVSSASTKGPSVFPLAPSSKSTSGGTAALGCLVKDYFPEPVTVSWNSGALTSGVHTFPAVLQSSGLYSLSSVVTVPSSSLGTQTYICNVNHKPSNTKVDKKVEPKSCDKTHTCPPCPAPELLGGPSVFLFPPKPKDTLMISRTPEVTCVVVDVSHEDPEVKFNWYVDGVEVHNAKTKPCEEQYGSTYRCVSVLTVLHQDWLNGKEYKCKVSNKALPAPIEKTISKAKGQPREPQVYTLPPSREEMTKNQVSLTCLVKGFYPSDIAVEWESNGQPENNYKTTPPVLDSDGSFFLYSKLTVDKSRWQQGNVFSCSVMHEALHNHYTQKSLSLSPGGGGGSSPGQGTQSENSCTQFPGNLPNMLRDLRDAFSRVKTFFQMKDQLDNLLLKESLLEDFKGYLGCQALSEMIQFYLEEVMPQAENQDPDIKAHVNSLGENLKTLRLRLRRCHRFLPCENGGGSGGKSKAVEQVKNAFNKLQEKGIYDAMSEFDIFINYIEAYMTMKIRN

SEQ ID NO: 2364 - protein, 166 aa, synthetic construct
  REGION 1..166: note = Synthetic
SPGQGTQSENSCTQFPGNLPNMLRDLRDAFSRVKTFFQMKDQLDNLLLKESLLEDFKGYLGCQALSEMIQFYLEEVMPQAENQDPDIKAHVNSLGENLKTLRLRLRRCHRFLPCENGGGSGGKSKAVEQVKNAFNKLQEKGIYDAMSEFDIFINYIEAYMTMKIRN

SEQ ID NO: 2365 - protein, 622 aa, synthetic construct
  REGION 1..622: note = Synthetic
QVQLVQSGAEVTKPGASVKVSCKASGYTFTRYDINWVRQATGQGLEWMGWMNPNSGNSGSVQKFRGRVTMTRDTSITTVYMELSSLRSDDTAVYYCARGGISSSWHWAFDIWGQGTMVTVSSASTKGPSVFPLAPSSKSTSGGTAALGCLVKDYFPEPVTVSWNSGALTSGVHTFPAVLQSSGLYSLSSVVTVPSSSLGTQTYICNVNHKPSNTKVDKKVEPKSCDKTHTCPPCPAPELLGGPSVFLFPPKPKDTLMISRTPEVTCVVVDVSHEDPEVKFNWYVDGVEVHNAKTKPCEEQYGSTYRCVSVLTVLHQDWLNGKEYKCKVSNKALPAPIEKTISKAKGQPREPQVYTLPPSREEMTKNQVSLTCLVKGFYPSDIAVEWESNGQPENNYKTTPPVLDSDGSFFLYSKLTVDKSRWQQGNVFSCSVMHEALHNHYTQKSLSLSPGGGGGSSPGQGTQSENSCTHFPGNLPNMLRDLRDAFSRVKTFFQMKDQLDNLLLKESLLEDFNGYLGCQALSEMIQFYLEEVMPQAENQDPDIKAHVNSLGENLKTLRLRLRRCHRFLPCENGGGSGGKSKAVEQVKNAFNKLQEKGIYKAMSEFDIFINYIEAYMTMKIRN

SEQ ID NO: 2366 - protein, 166 aa, synthetic construct
  REGION 1..166: note = Synthetic
SPGQGTQSENSCTHFPGNLPNMLRDLRDAFSRVKTFFQMKDQLDNLLLKESLLEDFNGYLGCQALSEMIQFYLEEVMPQAENQDPDIKAHVNSLGENLKTLRLRLRRCHRFLPCENGGGSGGKSKAVEQVKNAFNKLQEKGIYKAMSEFDIFINYIEAYMTMKIRN

SEQ ID NO: 2367 - protein, 622 aa, synthetic construct
  REGION 1..622: note = Synthetic
QVQLVQSGAEVTKPGASVKVSCKASGYTFTRYDINWVRQATGQGLEWMGWMNPNSGNSGSVQKFRGRVTMTRDTSITTVYMELSSLRSDDTAVYYCARGGISSSWHWAFDIWGQGTMVTVSSASTKGPSVFPLAPSSKSTSGGTAALGCLVKDYFPEPVTVSWNSGALTSGVHTFPAVLQSSGLYSLSSVVTVPSSSLGTQTYICNVNHKPSNTKVDKKVEPKSCDKTHTCPPCPAPELLGGPSVFLFPPKPKDTLMISRTPEVTCVVVDVSHEDPEVKFNWYVDGVEVHNAKTKPCEEQYGSTYRCVSVLTVLHQDWLNGKEYKCKVSNKALPAPIEKTISKAKGQPREPQVYTLPPSREEMTKNQVSLTCLVKGFYPSDIAVEWESNGQPENNYKTTPPVLDSDGSFFLYSKLTVDKSRWQQGNVFSCSVMHEALHNHYTQKSLSLSPGGGGGSSPGQGTQSENSCTHFPGNLPNMLRDLRDAFSRVKTFFQMKDQLDNLLLKESLLEDFNGYLGCQALSEMIQFYLEEVMPQAENQDPDIKAHVNSLGENLKTLRLRLRRCHRFLPCENGGGSGGKSKAVEQVKNAFNKLQEKGIYDAMSEFDIFINYIEAYMTMKIRN

SEQ ID NO: 2368 - protein, 166 aa, synthetic construct
  REGION 1..166: note = Synthetic
SPGQGTQSENSCTHFPGNLPNMLRDLRDAFSRVKTFFQMKDQLDNLLLKESLLEDFNGYLGCQALSEMIQFYLEEVMPQAENQDPDIKAHVNSLGENLKTLRLRLRRCHRFLPCENGGGSGGKSKAVEQVKNAFNKLQEKGIYDAMSEFDIFINYIEAYMTMKIRN

SEQ ID NO: 2369 - protein, 622 aa, synthetic construct
  REGION 1..622: note = Synthetic
QVQLVQSGAEVTKPGASVKVSCKASGYTFTRYDINWVRQATGQGLEWMGWMNPNSGNSGSVQKFRGRVTMTRDTSITTVYMELSSLRSDDTAVYYCARGGISSSWHWAFDIWGQGTMVTVSSASTKGPSVFPLAPSSKSTSGGTAALGCLVKDYFPEPVTVSWNSGALTSGVHTFPAVLQSSGLYSLSSVVTVPSSSLGTQTYICNVNHKPSNTKVDKKVEPKSCDKTHTCPPCPAPELLGGPSVFLFPPKPKDTLMISRTPEVTCVVVDVSHEDPEVKFNWYVDGVEVHNAKTKPCEEQYGSTYRCVSVLTVLHQDWLNGKEYKCKVSNKALPAPIEKTISKAKGQPREPQVYTLPPSREEMTKNQVSLTCLVKGFYPSDIAVEWESNGQPENNYKTTPPVLDSDGSFFLYSKLTVDKSRWQQGNVFSCSVMHEALHNHYTQKSLSLSPGGGGGSSPGQGTQSENSCTHFPGNLPNMLRDLRDAFSRVKTFFQMKDQLDNLLLKESLLEDFKGYLGCQALSEMIQFYLEEVMPQAENQDPDIKAHVNSLGENLKTLRLRLRRCHRFVPCENGGGSGGKSKAVEQVKNAFNKLQEKGIYKAMSEFDIFINYIEAYMTMKIRN

SEQ ID NO: 2370 - protein, 166 aa, synthetic construct
  REGION 1..166: note = Synthetic
SPGQGTQSENSCTHFPGNLPNMLRDLRDAFSRVKTFFQMKDQLDNLLLKESLLEDFKGYLGCQALSEMIQFYLEEVMPQAENQDPDIKAHVNSLGENLKTLRLRLRRCHRFVPCENGGGSGGKSKAVEQVKNAFNKLQEKGIYKAMSEFDIFINYIEAYMTMKIRN

SEQ ID NO: 2371 - protein, 622 aa, synthetic construct
  REGION 1..622: note = Synthetic
QVQLVQSGAEVTKPGASVKVSCKASGYTFTRYDINWVRQATGQGLEWMGWMNPNSGNSGSVQKFRGRVTMTRDTSITTVYMELSSLRSDDTAVYYCARGGISSSWHWAFDIWGQGTMVTVSSASTKGPSVFPLAPSSKSTSGGTAALGCLVKDYFPEPVTVSWNSGALTSGVHTFPAVLQSSGLYSLSSVVTVPSSSLGTQTYICNVNHKPSNTKVDKKVEPKSCDKTHTCPPCPAPELLGGPSVFLFPPKPKDTLMISRTPEVTCVVVDVSHEDPEVKFNWYVDGVEVHNAKTKPCEEQYGSTYRCVSVLTVLHQDWLNGKEYKCKVSNKALPAPIEKTISKAKGQPREPQVYTLPPSREEMTKNQVSLTCLVKGFYPSDIAVEWESNGQPENNYKTTPPVLDSDGSFFLYSKLTVDKSRWQQGNVFSCSVMHEALHNHYTQKSLSLSPGGGGGSSPGQGTQSENSCTHFPGNLPNMLRDLRDAFSRVKTFFQMKDQLDNLLLKESLLEDFKGYLGCQALSEMIQFYLEEVMPQAENQDPDIKAHVNSLGENLKTLRLRLRRCHRFVPCENGGGSGGKSKAVEQVKNAFNKLQEKGIYDAMSEFDIFINYIEAYMTMKIRN

SEQ ID NO: 2372 - protein, 166 aa, synthetic construct
  REGION 1..166: note = Synthetic
SPGQGTQSENSCTHFPGNLPNMLRDLRDAFSRVKTFFQMKDQLDNLLLKESLLEDFKGYLGCQALSEMIQFYLEEVMPQAENQDPDIKAHVNSLGENLKTLRLRLRRCHRFVPCENGGGSGGKSKAVEQVKNAFNKLQEKGIYDAMSEFDIFINYIEAYMTMKIRN

SEQ ID NO: 2373 - protein, 622 aa, synthetic construct
  REGION 1..622: note = Synthetic
QVQLVQSGAEVTKPGASVKVSCKASGYTFTRYDINWVRQATGQGLEWMGWMNPNSGNSGSVQKFRGRVTMTRDTSITTVYMELSSLRSDDTAVYYCARGGISSSWHWAFDIWGQGTMVTVSSASTKGPSVFPLAPSSKSTSGGTAALGCLVKDYFPEPVTVSWNSGALTSGVHTFPAVLQSSGLYSLSSVVTVPSSSLGTQTYICNVNHKPSNTKVDKKVEPKSCDKTHTCPPCPAPELLGGPSVFLFPPKPKDTLMISRTPEVTCVVVDVSHEDPEVKFNWYVDGVEVHNAKTKPCEEQYGSTYRCVSVLTVLHQDWLNGKEYKCKVSNKALPAPIEKTISKAKGQPREPQVYTLPPSREEMTKNQVSLTCLVKGFYPSDIAVEWESNGQPENNYKTTPPVLDSDGSFFLYSKLTVDKSRWQQGNVFSCSVMHEALHNHYTQKSLSLSPGGGGGSSPGQGTQSENSCTHFPGNLPNMLRDLRDAFSRVKTFFQMKDQLDNKLLKESLLEDFKGYLGCQALSEMIQFYLEEVMPQAENQDPDIKPHVNSLGENLKTLRLRLRRCHRFLPCENGGGSGGKSKAVEQVKNAFNKLQEKGIYKAMSEFDIFINYIEAYMTMKIRN

SEQ ID NO: 2374 - protein, 166 aa, synthetic construct
  REGION 1..166: note = Synthetic
SPGQGTQSENSCTHFPGNLPNMLRDLRDAFSRVKTFFQMKDQLDNKLLKESLLEDFKGYLGCQALSEMIQFYLEEVMPQAENQDPDIKPHVNSLGENLKTLRLRLRRCHRFLPCENGGGSGGKSKAVEQVKNAFNKLQEKGIYKAMSEFDIFINYIEAYMTMKIRN

SEQ ID NO: 2375 - protein, 622 aa, synthetic construct
  REGION 1..622: note = Synthetic
QVQLVQSGAEVTKPGASVKVSCKASGYTFTRYDINWVRQATGQGLEWMGWMNPNSGNSGSVQKFRGRVTMTRDTSITTVYMELSSLRSDDTAVYYCARGGISSSWHWAFDIWGQGTMVTVSSASTKGPSVFPLAPSSKSTSGGTAALGCLVKDYFPEPVTVSWNSGALTSGVHTFPAVLQSSGLYSLSSVVTVPSSSLGTQTYICNVNHKPSNTKVDKKVEPKSCDKTHTCPPCPAPELLGGPSVFLFPPKPKDTLMISRTPEVTCVVVDVSHEDPEVKFNWYVDGVEVHNAKTKPCEEQYGSTYRCVSVLTVLHQDWLNGKEYKCKVSNKALPAPIEKTISKAKGQPREPQVYTLPPSREEMTKNQVSLTCLVKGFYPSDIAVEWESNGQPENNYKTTPPVLDSDGSFFLYSKLTVDKSRWQQGNVFSCSVMHEALHNHYTQKSLSLSPGGGGGSSPGQGTQSENSCTHFPGNLPNMLRDLRDAFSRVKTFFQMKDQLDNKLLKESLLEDFKGYLGCQALSEMIQFYLEEVMPQAENQDPDIKAHVNSLGENLKTLRLRLRRCHRFLPCKNGGGSGGKSKAVEQVKNAFNKLQEKGIYKAMSEFDIFINYIEAYMTMKIRN

SEQ ID NO: 2376 - protein, 166 aa, synthetic construct
  REGION 1..166: note = Synthetic
SPGQGTQSENSCTHFPGNLPNMLRDLRDAFSRVKTFFQMKDQLDNKLLKESLLEDFKGYLGCQALSEMIQFYLEEVMPQAENQDPDIKAHVNSLGENLKTLRLRLRRCHRFLPCKNGGGSGGKSKAVEQVKNAFNKLQEKGIYKAMSEFDIFINYIEAYMTMKIRN

SEQ ID NO: 2377 - protein, 622 aa, synthetic construct
  REGION 1..622: note = Synthetic
QVQLVQSGAEVTKPGASVKVSCKASGYTFTRYDINWVRQATGQGLEWMGWMNPNSGNSGSVQKFRGRVTMTRDTSITTVYMELSSLRSDDTAVYYCARGGISSSWHWAFDIWGQGTMVTVSSASTKGPSVFPLAPSSKSTSGGTAALGCLVKDYFPEPVTVSWNSGALTSGVHTFPAVLQSSGLYSLSSVVTVPSSSLGTQTYICNVNHKPSNTKVDKKVEPKSCDKTHTCPPCPAPELLGGPSVFLFPPKPKDTLMISRTPEVTCVVVDVSHEDPEVKFNWYVDGVEVHNAKTKPCEEQYGSTYRCVSVLTVLHQDWLNGKEYKCKVSNKALPAPIEKTISKAKGQPREPQVYTLPPSREEMTKNQVSLTCLVKGFYPSDIAVEWESNGQPENNYKTTPPVLDSDGSFFLYSKLTVDKSRWQQGNVFSCSVMHEALHNHYTQKSLSLSPGGGGGSSPGQGTQSENSCTHFPGNLPNMLRDLRDAFSRVKTFFQMKDQLDNKLLKESLLEDYKGYLGCQALSEMIQFYLEEVMPQAENQDPDIKAHVNSLGENLKTLRLRLRRCHRFLPCENGGGSGGKSKAVEQVKNAFNKLQEKGIYKAMSEFDIFINYIEAYMTMKIRN

SEQ ID NO: 2378 - protein, 166 aa, synthetic construct
  REGION 1..166: note = Synthetic
SPGQGTQSENSCTHFPGNLPNMLRDLRDAFSRVKTFFQMKDQLDNKLLKESLLEDYKGYLGCQALSEMIQFYLEEVMPQAENQDPDIKAHVNSLGENLKTLRLRLRRCHRFLPCENGGGSGGKSKAVEQVKNAFNKLQEKGIYKAMSEFDIFINYIEAYMTMKIRN

SEQ ID NO: 2379 - protein, 622 aa, synthetic construct
  REGION 1..622: note = Synthetic
QVQLVQSGAEVTKPGASVKVSCKASGYTFTRYDINWVRQATGQGLEWMGWMNPNSGNSGSVQKFRGRVTMTRDTSITTVYMELSSLRSDDTAVYYCARGGISSSWHWAFDIWGQGTMVTVSSASTKGPSVFPLAPSSKSTSGGTAALGCLVKDYFPEPVTVSWNSGALTSGVHTFPAVLQSSGLYSLSSVVTVPSSSLGTQTYICNVNHKPSNTKVDKKVEPKSCDKTHTCPPCPAPELLGGPSVFLFPPKPKDTLMISRTPEVTCVVVDVSHEDPEVKFNWYVDGVEVHNAKTKPCEEQYGSTYRCVSVLTVLHQDWLNGKEYKCKVSNKALPAPIEKTISKAKGQPREPQVYTLPPSREEMTKNQVSLTCLVKGFYPSDIAVEWESNGQPENNYKTTPPVLDSDGSFFLYSKLTVDKSRWQQGNVFSCSVMHEALHNHYTQKSLSLSPGGGGGSSPGQGTQSENSCTHFPGNLPNMLRDLRDAFSRVKTFFQMKDQLDNKLLKESLLEDFKGYLGCQALSEMIQFYLEEVMPQAENQDPDIKAHVNSLGENLKTLRLRLRRCDRFLPCENGGGSGGKSKAVEQVKNAFNKLQEKGIYKAMSEFDIFINYIEAYMTMKIRN

SEQ ID NO: 2380 - protein, 166 aa, synthetic construct
  REGION 1..166: note = Synthetic
SPGQGTQSENSCTHFPGNLPNMLRDLRDAFSRVKTFFQMKDQLDNKLLKESLLEDFKGYLGCQALSEMIQFYLEEVMPQAENQDPDIKAHVNSLGENLKTLRLRLRRCDRFLPCENGGGSGGKSKAVEQVKNAFNKLQEKGIYKAMSEFDIFINYIEAYMTMKIRN

SEQ ID NO: 2381 - protein, 622 aa, synthetic construct
  REGION 1..622: note = Synthetic
QVQLVQSGAEVTKPGASVKVSCKASGYTFTRYDINWVRQATGQGLEWMGWMNPNSGNSGSVQKFRGRVTMTRDTSITTVYMELSSLRSDDTAVYYCARGGISSSWHWAFDIWGQGTMVTVSSASTKGPSVFPLAPSSKSTSGGTAALGCLVKDYFPEPVTVSWNSGALTSGVHTFPAVLQSSGLYSLSSVVTVPSSSLGTQTYICNVNHKPSNTKVDKKVEPKSCDKTHTCPPCPAPELLGGPSVFLFPPKPKDTLMISRTPEVTCVVVDVSHEDPEVKFNWYVDGVEVHNAKTKPCEEQYGSTYRCVSVLTVLHQDWLNGKEYKCKVSNKALPAPIEKTISKAKGQPREPQVYTLPPSREEMTKNQVSLTCLVKGFYPSDIAVEWESNGQPENNYKTTPPVLDSDGSFFLYSKLTVDKSRWQQGNVFSCSVMHEALHNHYTQKSLSLSPGGGGGSSPGQGTQSENSCTHFPGNLPNMLRDLRDAFSRVKTFFQMKDQLDNKLLKESLLEDFNGYLGCQALSEMIQFYLEEVMPQAENQDPDIKAHVNSLGENLKTLRLRLRRCHRFLPCENGGGSGGKSKAVEQVKNAFNKLQEKGIYKAMSEFDIFINYIEAYMTMKIRN

SEQ ID NO: 2382 - protein, 166 aa, synthetic construct
  REGION 1..166: note = Synthetic
SPGQGTQSENSCTHFPGNLPNMLRDLRDAFSRVKTFFQMKDQLDNKLLKESLLEDFNGYLGCQALSEMIQFYLEEVMPQAENQDPDIKAHVNSLGENLKTLRLRLRRCHRFLPCENGGGSGGKSKAVEQVKNAFNKLQEKGIYKAMSEFDIFINYIEAYMTMKIRN

SEQ ID NO: 2383 - protein, 622 aa, synthetic construct
  REGION 1..622: note = Synthetic
QVQLVQSGAEVTKPGASVKVSCKASGYTFTRYDINWVRQATGQGLEWMGWMNPNSGNSGSVQKFRGRVTMTRDTSITTVYMELSSLRSDDTAVYYCARGGISSSWHWAFDIWGQGTMVTVSSASTKGPSVFPLAPSSKSTSGGTAALGCLVKDYFPEPVTVSWNSGALTSGVHTFPAVLQSSGLYSLSSVVTVPSSSLGTQTYICNVNHKPSNTKVDKKVEPKSCDKTHTCPPCPAPELLGGPSVFLFPPKPKDTLMISRTPEVTCVVVDVSHEDPEVKFNWYVDGVEVHNAKTKPCEEQYGSTYRCVSVLTVLHQDWLNGKEYKCKVSNKALPAPIEKTISKAKGQPREPQVYTLPPSREEMTKNQVSLTCLVKGFYPSDIAVEWESNGQPENNYKTTPPVLDSDGSFFLYSKLTVDKSRWQQGNVFSCSVMHEALHNHYTQKSLSLSPGGGGGSSPGQGTQSENSCTHFPGNLPNMLRDLRDAFSRVKTFFQMKDQLDNKLLKESLLEDFKGYLGCQALSEMIQFYLEEVMPQAENQDPDIKAHVNSLGENLKTLRLRLRRCHRFVPCENGGGSGGKSKAVEQVKNAFNKLQEKGIYKAMSEFDIFINYIEAYMTMKIRN

SEQ ID NO: 2384 - protein, 166 aa, synthetic construct
  REGION 1..166: note = Synthetic
SPGQGTQSENSCTHFPGNLPNMLRDLRDAFSRVKTFFQMKDQLDNKLLKESLLEDFKGYLGCQALSEMIQFYLEEVMPQAENQDPDIKAHVNSLGENLKTLRLRLRRCHRFVPCENGGGSGGKSKAVEQVKNAFNKLQEKGIYKAMSEFDIFINYIEAYMTMKIRN

SEQ ID NO: 2385 - protein, 622 aa, synthetic construct
  REGION 1..622: note = Synthetic
QVQLVQSGAEVTKPGASVKVSCKASGYTFTRYDINWVRQATGQGLEWMGWMNPNSGNSGSVQKFRGRVTMTRDTSITTVYMELSSLRSDDTAVYYCARGGISSSWHWAFDIWGQGTMVTVSSASTKGPSVFPLAPSSKSTSGGTAALGCLVKDYFPEPVTVSWNSGALTSGVHTFPAVLQSSGLYSLSSVVTVPSSSLGTQTYICNVNHKPSNTKVDKKVEPKSCDKTHTCPPCPAPELLGGPSVFLFPPKPKDTLMISRTPEVTCVVVDVSHEDPEVKFNWYVDGVEVHNAKTKPCEEQYGSTYRCVSVLTVLHQDWLNGKEYKCKVSNKALPAPIEKTISKAKGQPREPQVYTLPPSREEMTKNQVSLTCLVKGFYPSDIAVEWESNGQPENNYKTTPPVLDSDGSFFLYSKLTVDKSRWQQGNVFSCSVMHEALHNHYTQKSLSLSPGGGGGSSPGQGTQSENSCTHFPGNLPNMLRDLRDAFSRVKTFFQMKDQLDNKLLKESLLEDFKGYQGCQALSEMIQFYLEEVMPQAENQDPDIKAHVNSLGENLKTLRLRLRRCHRFLPCENGGGSGGKSKAVEQVKNAFNKLQEKGIYKAMSEFDIFINYIEAYMTMKIRN

SEQ ID NO: 2386 - protein, 166 aa, synthetic construct
  REGION 1..166: note = Synthetic
SPGQGTQSENSCTHFPGNLPNMLRDLRDAFSRVKTFFQMKDQLDNKLLKESLLEDFKGYQGCQALSEMIQFYLEEVMPQAENQDPDIKAHVNSLGENLKTLRLRLRRCHRFLPCENGGGSGGKSKAVEQVKNAFNKLQEKGIYKAMSEFDIFINYIEAYMTMKIRN

SEQ ID NO: 2387 - protein, 622 aa, synthetic construct
  REGION 1..622: note = Synthetic
QVQLVQSGAEVTKPGASVKVSCKASGYTFTRYDINWVRQATGQGLEWMGWMNPNSGNSGSVQKFRGRVTMTRDTSITTVYMELSSLRSDDTAVYYCARGGISSSWHWAFDIWGQGTMVTVSSASTKGPSVFPLAPSSKSTSGGTAALGCLVKDYFPEPVTVSWNSGALTSGVHTFPAVLQSSGLYSLSSVVTVPSSSLGTQTYICNVNHKPSNTKVDKKVEPKSCDKTHTCPPCPAPELLGGPSVFLFPPKPKDTLMISRTPEVTCVVVDVSHEDPEVKFNWYVDGVEVHNAKTKPCEEQYGSTYRCVSVLTVLHQDWLNGKEYKCKVSNKALPAPIEKTISKAKGQPREPQVYTLPPSREEMTKNQVSLTCLVKGFYPSDIAVEWESNGQPENNYKTTPPVLDSDGSFFLYSKLTVDKSRWQQGNVFSCSVMHEALHNHYTQKSLSLSPGGGGGSSPGQGTQSENSCTHFPGNLPNMLRDLRDAFSRVKTFFQMKDQLDNKLLKESLLEDFKGYLGCQALSEMIQFYLEEVMPQAENQDPDIKAHVNSLGENLKTLRLRLRRCHRFLPCEDGGGSGGKSKAVEQVKNAFNKLQEKGIYKAMSEFDIFINYIEAYMTMKIRN

SEQ ID NO: 2388 - protein, 166 aa, synthetic construct
  REGION 1..166: note = Synthetic
SPGQGTQSENSCTHFPGNLPNMLRDLRDAFSRVKTFFQMKDQLDNKLLKESLLEDFKGYLGCQALSEMIQFYLEEVMPQAENQDPDIKAHVNSLGENLKTLRLRLRRCHRFLPCEDGGGSGGKSKAVEQVKNAFNKLQEKGIYKAMSEFDIFINYIEAYMTMKIRN

SEQ ID NO: 2389 - protein, 622 aa, synthetic construct
  REGION 1..622: note = Synthetic
QVQLVQSGAEVTKPGASVKVSCKASGYTFTRYDINWVRQATGQGLEWMGWMNPNSGNSGSVQKFRGRVTMTRDTSITTVYMELSSLRSDDTAVYYCARGGISSSWHWAFDIWGQGTMVTVSSASTKGPSVFPLAPSSKSTSGGTAALGCLVKDYFPEPVTVSWNSGALTSGVHTFPAVLQSSGLYSLSSVVTVPSSSLGTQTYICNVNHKPSNTKVDKKVEPKSCDKTHTCPPCPAPELLGGPSVFLFPPKPKDTLMISRTPEVTCVVVDVSHEDPEVKFNWYVDGVEVHNAKTKPCEEQYGSTYRCVSVLTVLHQDWLNGKEYKCKVSNKALPAPIEKTISKAKGQPREPQVYTLPPSREEMTKNQVSLTCLVKGFYPSDIAVEWESNGQPENNYKTTPPVLDSDGSFFLYSKLTVDKSRWQQGNVFSCSVMHEALHNHYTQKSLSLSPGGGGGSSPGQGTQSENSCTHFPGNLPNMLRDLRDAFSRVKTFFQMKDQLDNKLLKESLLEDFKGYLGCEALSEMIQFYLEEVMPQAENQDPDIKAHVNSLGENLKTLRLRLRRCHRFLPCENGGGSGGKSKAVEQVKNAFNKLQEKGIYKAMSEFDIFINYIEAYMTMKIRN

SEQ ID NO: 2390 - protein, 166 aa, synthetic construct
  REGION 1..166: note = Synthetic
SPGQGTQSENSCTHFPGNLPNMLRDLRDAFSRVKTFFQMKDQLDNKLLKESLLEDFKGYLGCEALSEMIQFYLEEVMPQAENQDPDIKAHVNSLGENLKTLRLRLRRCHRFLPCENGGGSGGKSKAVEQVKNAFNKLQEKGIYKAMSEFDIFINYIEAYMTMKIRN

SEQ ID NO: 2391 - protein, 622 aa, synthetic construct
  REGION 1..622: note = Synthetic
QVQLVQSGAEVTKPGASVKVSCKASGYTFTRYDINWVRQATGQGLEWMGWMNPNSGNSGSVQKFRGRVTMTRDTSITTVYMELSSLRSDDTAVYYCARGGISSSWHWAFDIWGQGTMVTVSSASTKGPSVFPLAPSSKSTSGGTAALGCLVKDYFPEPVTVSWNSGALTSGVHTFPAVLQSSGLYSLSSVVTVPSSSLGTQTYICNVNHKPSNTKVDKKVEPKSCDKTHTCPPCPAPELLGGPSVFLFPPKPKDTLMISRTPEVTCVVVDVSHEDPEVKFNWYVDGVEVHNAKTKPCEEQYGSTYRCVSVLTVLHQDWLNGKEYKCKVSNKALPAPIEKTISKAKGQPREPQVYTLPPSREEMTKNQVSLTCLVKGFYPSDIAVEWESNGQPENNYKTTPPVLDSDGSFFLYSKLTVDKSRWQQGNVFSCSVMHEALHNHYTQKSLSLSPGGGGGSSPGQGTQSENSCTHFPGNLPNMLRDLRDAFSRVKTFFQMKDQLDNKLLKESLLEDFKGYLGCLALSEMIQFYLEEVMPQAENQDPDIKAHVNSLGENLKTLRLRLRRCHRFLPCENGGGSGGKSKAVEQVKNAFNKLQEKGIYKAMSEFDIFINYIEAYMTMKIRN

SEQ ID NO: 2392 - protein, 166 aa, synthetic construct
  REGION 1..166: note = Synthetic
SPGQGTQSENSCTHFPGNLPNMLRDLRDAFSRVKTFFQMKDQLDNKLLKESLLEDFKGYLGCLALSEMIQFYLEEVMPQAENQDPDIKAHVNSLGENLKTLRLRLRRCHRFLPCENGGGSGGKSKAVEQVKNAFNKLQEKGIYKAMSEFDIFINYIEAYMTMKIRN

SEQ ID NO: 2393 - protein, 622 aa, synthetic construct
  REGION 1..622: note = Synthetic
QVQLVQSGAEVTKPGASVKVSCKASGYTFTRYDINWVRQATGQGLEWMGWMNPNSGNSGSVQKFRGRVTMTRDTSITTVYMELSSLRSDDTAVYYCARGGISSSWHWAFDIWGQGTMVTVSSASTKGPSVFPLAPSSKSTSGGTAALGCLVKDYFPEPVTVSWNSGALTSGVHTFPAVLQSSGLYSLSSVVTVPSSSLGTQTYICNVNHKPSNTKVDKKVEPKSCDKTHTCPPCPAPELLGGPSVFLFPPKPKDTLMISRTPEVTCVVVDVSHEDPEVKFNWYVDGVEVHNAKTKPCEEQYGSTYRCVSVLTVLHQDWLNGKEYKCKVSNKALPAPIEKTISKAKGQPREPQVYTLPPSREEMTKNQVSLTCLVKGFYPSDIAVEWESNGQPENNYKTTPPVLDSDGSFFLYSKLTVDKSRWQQGNVFSCSVMHEALHNHYTQKSLSLSPGGGGGSSPGQGTQSENSCTHFPGNLPNMLRDLRDAFSRVKTFFQMKDQLDNKLLKESLLEDFKGYLGCQALSEMIEFYLEEVMPQAENQDPDIKAHVNSLGENLKTLRLRLRRCHRFLPCENGGGSGGKSKAVEQVKNAFNKLQEKGIYKAMSEFDIFINYIEAYMTMKIRN

SEQ ID NO: 2394 - protein, 166 aa, synthetic construct
  REGION 1..166: note = Synthetic
SPGQGTQSENSCTHFPGNLPNMLRDLRDAFSRVKTFFQMKDQLDNKLLKESLLEDFKGYLGCQALSEMIEFYLEEVMPQAENQDPDIKAHVNSLGENLKTLRLRLRRCHRFLPCENGGGSGGKSKAVEQVKNAFNKLQEKGIYKAMSEFDIFINYIEAYMTMKIRN

SEQ ID NO: 2395 - protein, 622 aa, synthetic construct
  REGION 1..622: note = Synthetic
QVQLVQSGAEVTKPGASVKVSCKASGYTFTRYDINWVRQATGQGLEWMGWMNPNSGNSGSVQKFRGRVTMTRDTSITTVYMELSSLRSDDTAVYYCARGGISSSWHWAFDIWGQGTMVTVSSASTKGPSVFPLAPSSKSTSGGTAALGCLVKDYFPEPVTVSWNSGALTSGVHTFPAVLQSSGLYSLSSVVTVPSSSLGTQTYICNVNHKPSNTKVDKKVEPKSCDKTHTCPPCPAPELLGGPSVFLFPPKPKDTLMISRTPEVTCVVVDVSHEDPEVKFNWYVDGVEVHNAKTKPCEEQYGSTYRCVSVLTVLHQDWLNGKEYKCKVSNKALPAPIEKTISKAKGQPREPQVYTLPPSREEMTKNQVSLTCLVKGFYPSDIAVEWESNGQPENNYKTTPPVLDSDGSFFLYSKLTVDKSRWQQGNVFSCSVMHEALHNHYTQKSLSLSPGGGGGSSPGQGTQSENSCTHFPGNLPNMLRDLRDAFSRVKTFFQMKDQLDNKLLKESLLEDFKGYLGCQALSEMIKFYLEEVMPQAENQDPDIKAHVNSLGENLKTLRLRLRRCHRFLPCENGGGSGGKSKAVEQVKNAFNKLQEKGIYKAMSEFDIFINYIEAYMTMKIRN

SEQ ID NO: 2396 - protein, 166 aa, synthetic construct
  REGION 1..166: note = Synthetic
SPGQGTQSENSCTHFPGNLPNMLRDLRDAFSRVKTFFQMKDQLDNKLLKESLLEDFKGYLGCQALSEMIKFYLEEVMPQAENQDPDIKAHVNSLGENLKTLRLRLRRCHRFLPCENGGGSGGKSKAVEQVKNAFNKLQEKGIYKAMSEFDIFINYIEAYMTMKIRN

SEQ ID NO: 2397 - protein, 622 aa, synthetic construct
  REGION 1..622: note = Synthetic
QVQLVQSGAEVTKPGASVKVSCKASGYTFTRYDINWVRQATGQGLEWMGWMNPNSGNSGSVQKFRGRVTMTRDTSITTVYMELSSLRSDDTAVYYCARGGISSSWHWAFDIWGQGTMVTVSSASTKGPSVFPLAPSSKSTSGGTAALGCLVKDYFPEPVTVSWNSGALTSGVHTFPAVLQSSGLYSLSSVVTVPSSSLGTQTYICNVNHKPSNTKVDKKVEPKSCDKTHTCPPCPAPELLGGPSVFLFPPKPKDTLMISRTPEVTCVVVDVSHEDPEVKFNWYVDGVEVHNAKTKPCEEQYGSTYRCVSVLTVLHQDWLNGKEYKCKVSNKALPAPIEKTISKAKGQPREPQVYTLPPSREEMTKNQVSLTCLVKGFYPSDIAVEWESNGQPENNYKTTPPVLDSDGSFFLYSKLTVDKSRWQQGNVFSCSVMHEALHNHYTQKSLSLSPGGGGGSSPGQGTQSENSCTHFPGNLPNMLRDLRDAFSRVKTFFQMKDQLDNKLLKESLLEDFKGYLGCQALSEMIQFYLEEVMPQAENQDPDIKAHVNSLGENLKTLRLRLRRCHPFLPCENGGGSGGKSKAVEQVKNAFNKLQEKGIYKAMSEFDIFINYIEAYMTMKIRN

SEQ ID NO: 2398 - protein, 166 aa, synthetic construct
  REGION 1..166: note = Synthetic
SPGQGTQSENSCTHFPGNLPNMLRDLRDAFSRVKTFFQMKDQLDNKLLKESLLEDFKGYLGCQALSEMIQFYLEEVMPQAENQDPDIKAHVNSLGENLKTLRLRLRRCHPFLPCENGGGSGGKSKAVEQVKNAFNKLQEKGIYKAMSEFDIFINYIEAYMTMKIRN

SEQ ID NO: 2399 - protein, 622 aa, synthetic construct
  REGION 1..622: note = Synthetic
QVQLVQSGAEVTKPGASVKVSCKASGYTFTRYDINWVRQATGQGLEWMGWMNPNSGNSGSVQKFRGRVTMTRDTSITTVYMELSSLRSDDTAVYYCARGGISSSWHWAFDIWGQGTMVTVSSASTKGPSVFPLAPSSKSTSGGTAALGCLVKDYFPEPVTVSWNSGALTSGVHTFPAVLQSSGLYSLSSVVTVPSSSLGTQTYICNVNHKPSNTKVDKKVEPKSCDKTHTCPPCPAPELLGGPSVFLFPPKPKDTLMISRTPEVTCVVVDVSHEDPEVKFNWYVDGVEVHNAKTKPCEEQYGSTYRCVSVLTVLHQDWLNGKEYKCKVSNKALPAPIEKTISKAKGQPREPQVYTLPPSREEMTKNQVSLTCLVKGFYPSDIAVEWESNGQPENNYKTTPPVLDSDGSFFLYSKLTVDKSRWQQGNVFSCSVMHEALHNHYTQKSLSLSPGGGGGSSPGQGTQSENSCTHFPGNLPNMLRDLRDAFSRVKTFFQMKDQLDNKLLKESLLEDFKGYLGCQALSEMIQFYLEEVMPQAENQDPDIKAHVNSLGENLKTLRLRLRRCHQFLPCENGGGSGGKSKAVEQVKNAFNKLQEKGIYKAMSEFDIFINYIEAYMTMKIRN

SEQ ID NO: 2400 - protein, 166 aa, synthetic construct
  REGION 1..166: note = Synthetic
SPGQGTQSENSCTHFPGNLPNMLRDLRDAFSRVKTFFQMKDQLDNKLLKESLLEDFKGYLGCQALSEMIQFYLEEVMPQAENQDPDIKAHVNSLGENLKTLRLRLRRCHQFLPCENGGGSGGKSKAVEQVKNAFNKLQEKGIYKAMSEFDIFINYIEAYMTMKIRN

SEQ ID NO: 2401 - protein, 622 aa, synthetic construct
  REGION 1..622: note = Synthetic
QVQLVQSGAEVTKPGASVKVSCKASGYTFTRYDINWVRQATGQGLEWMGWMNPNSGNSGSVQKFRGRVTMTRDTSITTVYMELSSLRSDDTAVYYCARGGISSSWHWAFDIWGQGTMVTVSSASTKGPSVFPLAPSSKSTSGGTAALGCLVKDYFPEPVTVSWNSGALTSGVHTFPAVLQSSGLYSLSSVVTVPSSSLGTQTYICNVNHKPSNTKVDKKVEPKSCDKTHTCPPCPAPELLGGPSVFLFPPKPKDTLMISRTPEVTCVVVDVSHEDPEVKFNWYVDGVEVHNAKTKPCEEQYGSTYRCVSVLTVLHQDWLNGKEYKCKVSNKALPAPIEKTISKAKGQPREPQVYTLPPSREEMTKNQVSLTCLVKGFYPSDIAVEWESNGQPENNYKTTPPVLDSDGSFFLYSKLTVDKSRWQQGNVFSCSVMHEALHNHYTQKSLSLSPGGGGGSSPGQGTQSENSCTHFPGNLPNMLRDLRDAFSRVKTFFQMKDQLDNKLLKESLLEDFKGYLGCQALSEMIQFYLEEVMPQAENQDPDIKAHVNSLGENLKTLRLRLRRCHRFLPCENAGGSGGKSKAVEQVKNAFNKLQEKGIYKAMSEFDIFINYIEAYMTMKIRN

SEQ ID NO: 2402 - protein, 166 aa, synthetic construct
  REGION 1..166: note = Synthetic
SPGQGTQSENSCTHFPGNLPNMLRDLRDAFSRVKTFFQMKDQLDNKLLKESLLEDFKGYLGCQALSEMIQFYLEEVMPQAENQDPDIKAHVNSLGENLKTLRLRLRRCHRFLPCENAGGSGGKSKAVEQVKNAFNKLQEKGIYKAMSEFDIFINYIEAYMTMKIRN

SEQ ID NO: 2403 - protein, 622 aa, synthetic construct
  REGION 1..622: note = Synthetic
QVQLVQSGAEVTKPGASVKVSCKASGYTFTRYDINWVRQATGQGLEWMGWMNPNSGNSGSVQKFRGRVTMTRDTSITTVYMELSSLRSDDTAVYYCARGGISSSWHWAFDIWGQGTMVTVSSASTKGPSVFPLAPSSKSTSGGTAALGCLVKDYFPEPVTVSWNSGALTSGVHTFPAVLQSSGLYSLSSVVTVPSSSLGTQTYICNVNHKPSNTKVDKKVEPKSCDKTHTCPPCPAPELLGGPSVFLFPPKPKDTLMISRTPEVTCVVVDVSHEDPEVKFNWYVDGVEVHNAKTKPCEEQYGSTYRCVSVLTVLHQDWLNGKEYKCKVSNKALPAPIEKTISKAKGQPREPQVYTLPPSREEMTKNQVSLTCLVKGFYPSDIAVEWESNGQPENNYKTTPPVLDSDGSFFLYSKLTVDKSRWQQGNVFSCSVMHEALHNHYTQKSLSLSPGGGGGSSPGQGTQSENSCTHFPGNLPNMLRDLRDAFSRVKTFFQMKDQLDNKLLKESLLEDFKGYLGCQALSEMIQFYLEEVMPQAENQDPDIKAHVNSLGENLKTLRLRLRRCHRFLPCENVGGSGGKSKAVEQVKNAFNKLQEKGIYKAMSEFDIFINYIEAYMTMKIRN

SEQ ID NO: 2404 - protein, 166 aa, synthetic construct
  REGION 1..166: note = Synthetic
SPGQGTQSENSCTHFPGNLPNMLRDLRDAFSRVKTFFQMKDQLDNKLLKESLLEDFKGYLGCQALSEMIQFYLEEVMPQAENQDPDIKAHVNSLGENLKTLRLRLRRCHRFLPCENVGGSGGKSKAVEQVKNAFNKLQEKGIYKAMSEFDIFINYIEAYMTMKIRN

SEQ ID NO: 2405 - protein, 622 aa, synthetic construct
  REGION 1..622: note = Synthetic
QVQLVQSGAEVTKPGASVKVSCKASGYTFTRYDINWVRQATGQGLEWMGWMNPNSGNSGSVQKFRGRVTMTRDTSITTVYMELSSLRSDDTAVYYCARGGISSSWHWAFDIWGQGTMVTVSSASTKGPSVFPLAPSSKSTSGGTAALGCLVKDYFPEPVTVSWNSGALTSGVHTFPAVLQSSGLYSLSSVVTVPSSSLGTQTYICNVNHKPSNTKVDKKVEPKSCDKTHTCPPCPAPELLGGPSVFLFPPKPKDTLMISRTPEVTCVVVDVSHEDPEVKFNWYVDGVEVHNAKTKPCEEQYGSTYRCVSVLTVLHQDWLNGKEYKCKVSNKALPAPIEKTISKAKGQPREPQVYTLPPSREEMTKNQVSLTCLVKGFYPSDIAVEWESNGQPENNYKTTPPVLDSDGSFFLYSKLTVDKSRWQQGNVFSCSVMHEALHNHYTQKSLSLSPGGGGGSSPGQGTQSENSCTHFPGNLPNMLRDLRDAFSRVKTFFQMKDQLDNKLLKESLLEDFKGYLGCQALSEMIQFYLEEVMPQAENQDPDIKAHVNSLGENLKTLRLRLRRCHRFLPCENGGGSAGKSKAVEQVKNAFNKLQEKGIYKAMSEFDIFINYIEAYMTMKIRN

SEQ ID NO: 2406 - protein, 166 aa, synthetic construct
  REGION 1..166: note = Synthetic
SPGQGTQSENSCTHFPGNLPNMLRDLRDAFSRVKTFFQMKDQLDNKLLKESLLEDFKGYLGCQALSEMIQFYLEEVMPQAENQDPDIKAHVNSLGENLKTLRLRLRRCHRFLPCENGGGSAGKSKAVEQVKNAFNKLQEKGIYKAMSEFDIFINYIEAYMTMKIRN

SEQ ID NO: 2407 - protein, 622 aa, synthetic construct
  REGION 1..622: note = Synthetic
QVQLVQSGAEVTKPGASVKVSCKASGYTFTRYDINWVRQATGQGLEWMGWMNPNSGNSGSVQKFRGRVTMTRDTSITTVYMELSSLRSDDTAVYYCARGGISSSWHWAFDIWGQGTMVTVSSASTKGPSVFPLAPSSKSTSGGTAALGCLVKDYFPEPVTVSWNSGALTSGVHTFPAVLQSSGLYSLSSVVTVPSSSLGTQTYICNVNHKPSNTKVDKKVEPKSCDKTHTCPPCPAPELLGGPSVFLFPPKPKDTLMISRTPEVTCVVVDVSHEDPEVKFNWYVDGVEVHNAKTKPCEEQYGSTYRCVSVLTVLHQDWLNGKEYKCKVSNKALPAPIEKTISKAKGQPREPQVYTLPPSREEMTKNQVSLTCLVKGFYPSDIAVEWESNGQPENNYKTTPPVLDSDGSFFLYSKLTVDKSRWQQGNVFSCSVMHEALHNHYTQKSLSLSPGGGGGSSPGQGTQSENSCTHFPGNLPNMLRDLRDAFSRVKTFFQMKDQLDNKLLKESLLEDFKGYLGCQALSEMIQFYLEEVMPQAENQDPDIKAHVNSLGENLKTLRLRLRRCHRFLPCENGGGSGGKSKAVEQVKNAFNQLQEKGIYKAMSEFDIFINYIEAYMTMKIRN

SEQ ID NO: 2408 - protein, 166 aa, synthetic construct
  REGION 1..166: note = Synthetic
SPGQGTQSENSCTHFPGNLPNMLRDLRDAFSRVKTFFQMKDQLDNKLLKESLLEDFKGYLGCQALSEMIQFYLEEVMPQAENQDPDIKAHVNSLGENLKTLRLRLRRCHRFLPCENGGGSGGKSKAVEQVKNAFNQLQEKGIYKAMSEFDIFINYIEAYMTMKIRN

SEQ ID NO: 2409 - protein, 622 aa, synthetic construct
  REGION 1..622: note = Synthetic
QVQLVQSGAEVTKPGASVKVSCKASGYTFTRYDINWVRQATGQGLEWMGWMNPNSGNSGSVQKFRGRVTMTRDTSITTVYMELSSLRSDDTAVYYCARGGISSSWHWAFDIWGQGTMVTVSSASTKGPSVFPLAPSSKSTSGGTAALGCLVKDYFPEPVTVSWNSGALTSGVHTFPAVLQSSGLYSLSSVVTVPSSSLGTQTYICNVNHKPSNTKVDKKVEPKSCDKTHTCPPCPAPELLGGPSVFLFPPKPKDTLMISRTPEVTCVVVDVSHEDPEVKFNWYVDGVEVHNAKTKPCEEQYGSTYRCVSVLTVLHQDWLNGKEYKCKVSNKALPAPIEKTISKAKGQPREPQVYTLPPSREEMTKNQVSLTCLVKGFYPSDIAVEWESNGQPENNYKTTPPVLDSDGSFFLYSKLTVDKSRWQQGNVFSCSVMHEALHNHYTQKSLSLSPGGGGGSSPGQGTQSENSCTHFPGNLPNMLRDLRDAFSRVKTFFQMKDQLDNKLLKESLLEDFKGYLGCQALSEMIQFYLEEVMPQAENQDPDIKAHVNSLGENLKTLRLRLRRCHRFLPCENGGGSGGKSKAVEQVKNAFNKLQEKGIYKAMSEFDIFINYIEAYMTMNIRN

SEQ ID NO: 2410 - protein, 166 aa, synthetic construct
  REGION 1..166: note = Synthetic
SPGQGTQSENSCTHFPGNLPNMLRDLRDAFSRVKTFFQMKDQLDNKLLKESLLEDFKGYLGCQALSEMIQFYLEEVMPQAENQDPDIKAHVNSLGENLKTLRLRLRRCHRFLPCENGGGSGGKSKAVEQVKNAFNKLQEKGIYKAMSEFDIFINYIEAYMTMNIRN

SEQ ID NO: 2411 - protein, 622 aa, synthetic construct
  REGION 1..622: note = Synthetic
QVQLVQSGAEVTKPGASVKVSCKASGYTFTRYDINWVRQATGQGLEWMGWMNPNSGNSGSVQKFRGRVTMTRDTSITTVYMELSSLRSDDTAVYYCARGGISSSWHWAFDIWGQGTMVTVSSASTKGPSVFPLAPSSKSTSGGTAALGCLVKDYFPEPVTVSWNSGALTSGVHTFPAVLQSSGLYSLSSVVTVPSSSLGTQTYICNVNHKPSNTKVDKKVEPKSCDKTHTCPPCPAPELLGGPSVFLFPPKPKDTLMISRTPEVTCVVVDVSHEDPEVKFNWYVDGVEVHNAKTKPCEEQYGSTYRCVSVLTVLHQDWLNGKEYKCKVSNKALPAPIEKTISKAKGQPREPQVYTLPPSREEMTKNQVSLTCLVKGFYPSDIAVEWESNGQPENNYKTTPPVLDSDGSFFLYSKLTVDKSRWQQGNVFSCSVMHEALHNHYTQKSLSLSPGGGGGSSPGQGTQSENSCTHFPGNLPNMLRDLRDAFSRVKTFFQMKDQLDNKLLKESLLEDFKGYLGCQALSEMIQFYLEEVMPQAENQDPDIKAHVNSLGENLKTLRLRLRRCHRFLPCENGGGSGGKSKAVEQVKNAFNKLQEKGIYKAMSEFDIFINYIEAYVTMKIRN

SEQ ID NO: 2412 - protein, 166 aa, synthetic construct
  REGION 1..166: note = Synthetic
SPGQGTQSENSCTHFPGNLPNMLRDLRDAFSRVKTFFQMKDQLDNKLLKESLLEDFKGYLGCQALSEMIQFYLEEVMPQAENQDPDIKAHVNSLGENLKTLRLRLRRCHRFLPCENGGGSGGKSKAVEQVKNAFNKLQEKGIYKAMSEFDIFINYIEAYVTMKIRN

SEQ ID NO: 2413 - protein, 622 aa, synthetic construct
  REGION 1..622: note = Synthetic
QVQLVQSGAEVTKPGASVKVSCKASGYTFTRYDINWVRQATGQGLEWMGWMNPNSGNSGSVQKFRGRVTMTRDTSITTVYMELSSLRSDDTAVYYCARGGISSSWHWAFDIWGQGTMVTVSSASTKGPSVFPLAPSSKSTSGGTAALGCLVKDYFPEPVTVSWNSGALTSGVHTFPAVLQSSGLYSLSSVVTVPSSSLGTQTYICNVNHKPSNTKVDKKVEPKSCDKTHTCPPCPAPELLGGPSVFLFPPKPKDTLMISRTPEVTCVVVDVSHEDPEVKFNWYVDGVEVHNAKTKPCEEQYGSTYRCVSVLTVLHQDWLNGKEYKCKVSNKALPAPIEKTISKAKGQPREPQVYTLPPSREEMTKNQVSLTCLVKGFYPSDIAVEWESNGQPENNYKTTPPVLDSDGSFFLYSKLTVDKSRWQQGNVFSCSVMHEALHNHYTQKSLSLSPGGGGGSSPGQGTQSENSCTHFPGNLPNMLRDLRDAFSRVKTFFQMKDQLDNKLLKESLLEDFKGYLGCQALSEMIQFYLEEVMPQAENQDPDIKAHVNSLGENLKTLRLRLRRCHRFLPCENGGGSGGKSKAVEQVKNAFNKLQEKGIYKAMSEFDIFINYIEAYMTMKIRD

SEQ ID NO: 2414 - protein, 166 aa, synthetic construct
  REGION 1..166: note = Synthetic
SPGQGTQSENSCTHFPGNLPNMLRDLRDAFSRVKTFFQMKDQLDNKLLKESLLEDFKGYLGCQALSEMIQFYLEEVMPQAENQDPDIKAHVNSLGENLKTLRLRLRRCHRFLPCENGGGSGGKSKAVEQVKNAFNKLQEKGIYKAMSEFDIFINYIEAYMTMKIRD

SEQ ID NO: 2415 - protein, 622 aa, synthetic construct
  REGION 1..622: note = Synthetic
QVQLVQSGAEVTKPGASVKVSCKASGYTFTRYDINWVRQATGQGLEWMGWMNPNSGNSGSVQKFRGRVTMTRDTSITTVYMELSSLRSDDTAVYYCARGGISSSWHWAFDIWGQGTMVTVSSASTKGPSVFPLAPSSKSTSGGTAALGCLVKDYFPEPVTVSWNSGALTSGVHTFPAVLQSSGLYSLSSVVTVPSSSLGTQTYICNVNHKPSNTKVDKKVEPKSCDKTHTCPPCPAPELLGGPSVFLFPPKPKDTLMISRTPEVTCVVVDVSHEDPEVKFNWYVDGVEVHNAKTKPCEEQYGSTYRCVSVLTVLHQDWLNGKEYKCKVSNKALPAPIEKTISKAKGQPREPQVYTLPPSREEMTKNQVSLTCLVKGFYPSDIAVEWESNGQPENNYKTTPPVLDSDGSFFLYSKLTVDKSRWQQGNVFSCSVMHEALHNHYTQKSLSLSPGGGGGSSPGQGTQSENSCTHFPGNLPNMLRDLRDAFSRVKTFFQMKDQLDNLLLKESLLEDFKGYQGCQALSEMIQFYLEEVMPQAENQDPDIKAHVNSLGENLKTLRLRLRRCHRFLPCENGGGSGGKSKAVEQVKNAFNKLQEKGIYKAMSEFDIFINYIEAYMTMKIRN

SEQ ID NO: 2416 - protein, 166 aa, synthetic construct
  REGION 1..166: note = Synthetic
SPGQGTQSENSCTHFPGNLPNMLRDLRDAFSRVKTFFQMKDQLDNLLLKESLLEDFKGYQGCQALSEMIQFYLEEVMPQAENQDPDIKAHVNSLGENLKTLRLRLRRCHRFLPCENGGGSGGKSKAVEQVKNAFNKLQEKGIYKAMSEFDIFINYIEAYMTMKIRN

SEQ ID NO: 2417 - protein, 622 aa, synthetic construct
  REGION 1..622: note = Synthetic
QVQLVQSGAEVTKPGASVKVSCKASGYTFTRYDINWVRQATGQGLEWMGWMNPNSGNSGSVQKFRGRVTMTRDTSITTVYMELSSLRSDDTAVYYCARGGISSSWHWAFDIWGQGTMVTVSSASTKGPSVFPLAPSSKSTSGGTAALGCLVKDYFPEPVTVSWNSGALTSGVHTFPAVLQSSGLYSLSSVVTVPSSSLGTQTYICNVNHKPSNTKVDKKVEPKSCDKTHTCPPCPAPELLGGPSVFLFPPKPKDTLMISRTPEVTCVVVDVSHEDPEVKFNWYVDGVEVHNAKTKPCEEQYGSTYRCVSVLTVLHQDWLNGKEYKCKVSNKALPAPIEKTISKAKGQPREPQVYTLPPSREEMTKNQVSLTCLVKGFYPSDIAVEWESNGQPENNYKTTPPVLDSDGSFFLYSKLTVDKSRWQQGNVFSCSVMHEALHNHYTQKSLSLSPGGGGGSSPGQGTQSENSCTHFPGNLPNMLRDLRDAFSRVKTFFQMKDQLDNLLLKESLLEDFKGYQGCQALSEMIQFYLEEVMPQAENQDPDIKAHVNSLGENLKTLRLRLRRCHRFLPCENGGGSGGKSKAVEQVKNAFNKLQEKGIYDAMSEFDIFINYIEAYMTMKIRN

SEQ ID NO: 2418 - protein, 166 aa, synthetic construct
  REGION 1..166: note = Synthetic
SPGQGTQSENSCTHFPGNLPNMLRDLRDAFSRVKTFFQMKDQLDNLLLKESLLEDFKGYQGCQALSEMIQFYLEEVMPQAENQDPDIKAHVNSLGENLKTLRLRLRRCHRFLPCENGGGSGGKSKAVEQVKNAFNKLQEKGIYDAMSEFDIFINYIEAYMTMKIRN

SEQ ID NO: 2419 - protein, 622 aa, synthetic construct
  REGION 1..622: note = Synthetic
QVQLVQSGAEVTKPGASVKVSCKASGYTFTRYDINWVRQATGQGLEWMGWMNPNSGNSGSVQKFRGRVTMTRDTSITTVYMELSSLRSDDTAVYYCARGGISSSWHWAFDIWGQGTMVTVSSASTKGPSVFPLAPSSKSTSGGTAALGCLVKDYFPEPVTVSWNSGALTSGVHTFPAVLQSSGLYSLSSVVTVPSSSLGTQTYICNVNHKPSNTKVDKKVEPKSCDKTHTCPPCPAPELLGGPSVFLFPPKPKDTLMISRTPEVTCVVVDVSHEDPEVKFNWYVDGVEVHNAKTKPCEEQYGSTYRCVSVLTVLHQDWLNGKEYKCKVSNKALPAPIEKTISKAKGQPREPQVYTLPPSREEMTKNQVSLTCLVKGFYPSDIAVEWESNGQPENNYKTTPPVLDSDGSFFLYSKLTVDKSRWQQGNVFSCSVMHEALHNHYTQKSLSLSPGGGGGSSPGQGTQSENSCTHFPGNLPNVLRDLRDAFSRVKTFFQMKDQLDNKLLKESLLEDFKGYLGCQALSEMIQFYLEEVMPQAENQDPDIKAHVNSLGENLKTLRLRLRRCHRFLPCENGGGSGGKSKAVEQVKNAFNKLQEKGIYKAMSEFDIFINYIEAYMTMKIRN

SEQ ID NO: 2420 - protein, 166 aa, synthetic construct
  REGION 1..166: note = Synthetic
SPGQGTQSENSCTHFPGNLPNVLRDLRDAFSRVKTFFQMKDQLDNKLLKESLLEDFKGYLGCQALSEMIQFYLEEVMPQAENQDPDIKAHVNSLGENLKTLRLRLRRCHRFLPCENGGGSGGKSKAVEQVKNAFNKLQEKGIYKAMSEFDIFINYIEAYMTMKIRN

SEQ ID NO: 2421 - protein, 622 aa, synthetic construct
  REGION 1..622: note = Synthetic
QVQLVQSGAEVTKPGASVKVSCKASGYTFTRYDINWVRQATGQGLEWMGWMNPNSGNSGSVQKFRGRVTMTRDTSITTVYMELSSLRSDDTAVYYCARGGISSSWHWAFDIWGQGTMVTVSSASTKGPSVFPLAPSSKSTSGGTAALGCLVKDYFPEPVTVSWNSGALTSGVHTFPAVLQSSGLYSLSSVVTVPSSSLGTQTYICNVNHKPSNTKVDKKVEPKSCDKTHTCPPCPAPELLGGPSVFLFPPKPKDTLMISRTPEVTCVVVDVSHEDPEVKFNWYVDGVEVHNAKTKPCEEQYGSTYRCVSVLTVLHQDWLNGKEYKCKVSNKALPAPIEKTISKAKGQPREPQVYTLPPSREEMTKNQVSLTCLVKGFYPSDIAVEWESNGQPENNYKTTPPVLDSDGSFFLYSKLTVDKSRWQQGNVFSCSVMHEALHNHYTQKSLSLSPGGGGGSSPGQGTQSENSCTHFPGNLPNVLRDLRDAFSRVKTFFEMKDQLDNLLLKESLLEDFKGYLGCQALSEMIQFYLEEVMPQAENQDPDIKAHVNSLGENLKTLRLRLRRCHRFLPCENGGGSGGKSKAVEQVKNAFNKLQEKGIYKAMSEFDIFINYIEAYMTMKIRN

SEQ ID NO: 2422 - protein, 166 aa, synthetic construct
  REGION 1..166: note = Synthetic
SPGQGTQSENSCTHFPGNLPNVLRDLRDAFSRVKTFFEMKDQLDNLLLKESLLEDFKGYLGCQALSEMIQFYLEEVMPQAENQDPDIKAHVNSLGENLKTLRLRLRRCHRFLPCENGGGSGGKSKAVEQVKNAFNKLQEKGIYKAMSEFDIFINYIEAYMTMKIRN

SEQ ID NO: 2423 - protein, 622 aa, synthetic construct
  REGION 1..622: note = Synthetic
QVQLVQSGAEVTKPGASVKVSCKASGYTFTRYDINWVRQATGQGLEWMGWMNPNSGNSGSVQKFRGRVTMTRDTSITTVYMELSSLRSDDTAVYYCARGGISSSWHWAFDIWGQGTMVTVSSASTKGPSVFPLAPSSKSTSGGTAALGCLVKDYFPEPVTVSWNSGALTSGVHTFPAVLQSSGLYSLSSVVTVPSSSLGTQTYICNVNHKPSNTKVDKKVEPKSCDKTHTCPPCPAPELLGGPSVFLFPPKPKDTLMISRTPEVTCVVVDVSHEDPEVKFNWYVDGVEVHNAKTKPCEEQYGSTYRCVSVLTVLHQDWLNGKEYKCKVSNKALPAPIEKTISKAKGQPREPQVYTLPPSREEMTKNQVSLTCLVKGFYPSDIAVEWESNGQPENNYKTTPPVLDSDGSFFLYSKLTVDKSRWQQGNVFSCSVMHEALHNHYTQKSLSLSPGGGGGSSPGQGTQSENSCTHFPGNLPNVLRDLRDAFSRVKTFFQMKDQLDNLLLKESLLEDFKGYLGCQALSEMIQFYLEEVMPQAENQDPDIKAHVNSLGENLKTLRLRLRRCHRFLPCENGGGSGGKSKAVEQVKNAFNKLQEKGIYKAMSEFDIFINYIEAYMTMKIRN

SEQ ID NO: 2424 - protein, 166 aa, synthetic construct
  REGION 1..166: note = Synthetic
SPGQGTQSENSCTHFPGNLPNVLRDLRDAFSRVKTFFQMKDQLDNLLLKESLLEDFKGYLGCQALSEMIQFYLEEVMPQAENQDPDIKAHVNSLGENLKTLRLRLRRCHRFLPCENGGGSGGKSKAVEQVKNAFNKLQEKGIYKAMSEFDIFINYIEAYMTMKIRN

SEQ ID NO: 2425 - protein, 622 aa, synthetic construct
  REGION 1..622: note = Synthetic
QVQLVQSGAEVTKPGASVKVSCKASGYTFTRYDINWVRQATGQGLEWMGWMNPNSGNSGSVQKFRGRVTMTRDTSITTVYMELSSLRSDDTAVYYCARGGISSSWHWAFDIWGQGTMVTVSSASTKGPSVFPLAPSSKSTSGGTAALGCLVKDYFPEPVTVSWNSGALTSGVHTFPAVLQSSGLYSLSSVVTVPSSSLGTQTYICNVNHKPSNTKVDKKVEPKSCDKTHTCPPCPAPELLGGPSVFLFPPKPKDTLMISRTPEVTCVVVDVSHEDPEVKFNWYVDGVEVHNAKTKPCEEQYGSTYRCVSVLTVLHQDWLNGKEYKCKVSNKALPAPIEKTISKAKGQPREPQVYTLPPSREEMTKNQVSLTCLVKGFYPSDIAVEWESNGQPENNYKTTPPVLDSDGSFFLYSKLTVDKSRWQQGNVFSCSVMHEALHNHYTQKSLSLSPGGGGGSSPGQGTQSENSCTHFPGNLPNVLRDLRDAFSRVKTFFQMKDQLDNLLLKESLLEDFKGYLGCQALSEMIQFYLEEVMPQAENQDPDIKAHVNSLGENLKTLRLRLRRCHRFLPCENGGGSGGKSKAVEQVKNAFNKLQEKGIYDAMSEFDIFINYIEAYMTMKIRN

SEQ ID NO: 2426 - protein, 166 aa, synthetic construct
  REGION 1..166: note = Synthetic
SPGQGTQSENSCTHFPGNLPNVLRDLRDAFSRVKTFFQMKDQLDNLLLKESLLEDFKGYLGCQALSEMIQFYLEEVMPQAENQDPDIKAHVNSLGENLKTLRLRLRRCHRFLPCENGGGSGGKSKAVEQVKNAFNKLQEKGIYDAMSEFDIFINYIEAYMTMKIRN

SEQ ID NO: 2427 - protein, 622 aa, synthetic construct
  REGION 1..622: note = Synthetic
QVQLVQSGAEVTKPGASVKVSCKASGYTFTRYDINWVRQATGQGLEWMGWMNPNSGNSGSVQKFRGRVTMTRDTSITTVYMELSSLRSDDTAVYYCARGGISSSWHWAFDIWGQGTMVTVSSASTKGPSVFPLAPSSKSTSGGTAALGCLVKDYFPEPVTVSWNSGALTSGVHTFPAVLQSSGLYSLSSVVTVPSSSLGTQTYICNVNHKPSNTKVDKKVEPKSCDKTHTCPPCPAPELLGGPSVFLFPPKPKDTLMISRTPEVTCVVVDVSHEDPEVKFNWYVDGVEVHNAKTKPCEEQYGSTYRCVSVLTVLHQDWLNGKEYKCKVSNKALPAPIEKTISKAKGQPREPQVYTLPPSREEMTKNQVSLTCLVKGFYPSDIAVEWESNGQPENNYKTTPPVLDSDGSFFLYSKLTVDKSRWQQGNVFSCSVMHEALHNHYTQKSLSLSPGGGGGSSPGQGTQSENSCTHFPGNLPNMLRDLRDAFSRVKTFFQMKDQLDNLLLKESLLEDFKGYLGCQALSEMIQFYLEEVMPQAENQDPDIKAHVNSLGENLKTLRLRLRRCHRFLPCEDGGGSGGKSKAVEQVKNAFNKLQEKGIYKAMSEFDIFINYIEAYMTMKIRN

SEQ ID NO: 2428 - protein, 166 aa, synthetic construct
  REGION 1..166: note = Synthetic
SPGQGTQSENSCTHFPGNLPNMLRDLRDAFSRVKTFFQMKDQLDNLLLKESLLEDFKGYLGCQALSEMIQFYLEEVMPQAENQDPDIKAHVNSLGENLKTLRLRLRRCHRFLPCEDGGGSGGKSKAVEQVKNAFNKLQEKGIYKAMSEFDIFINYIEAYMTMKIRN

SEQ ID NO: 2429 - protein, 622 aa, synthetic construct
  REGION 1..622: note = Synthetic
QVQLVQSGAEVTKPGASVKVSCKASGYTFTRYDINWVRQATGQGLEWMGWMNPNSGNSGSVQKFRGRVTMTRDTSITTVYMELSSLRSDDTAVYYCARGGISSSWHWAFDIWGQGTMVTVSSASTKGPSVFPLAPSSKSTSGGTAALGCLVKDYFPEPVTVSWNSGALTSGVHTFPAVLQSSGLYSLSSVVTVPSSSLGTQTYICNVNHKPSNTKVDKKVEPKSCDKTHTCPPCPAPELLGGPSVFLFPPKPKDTLMISRTPEVTCVVVDVSHEDPEVKFNWYVDGVEVHNAKTKPCEEQYGSTYRCVSVLTVLHQDWLNGKEYKCKVSNKALPAPIEKTISKAKGQPREPQVYTLPPSREEMTKNQVSLTCLVKGFYPSDIAVEWESNGQPENNYKTTPPVLDSDGSFFLYSKLTVDKSRWQQGNVFSCSVMHEALHNHYTQKSLSLSPGGGGGSSPGQGTQSENSCTHFPGNLPNMLRDLRDAFSRVKTFFQMKDQLDNLLLKESLLEDFKGYLGCQALSEMIQFYLEEVMPQAENQDPDIKAHVNSLGENLKTLRLRLRRCHRFLPCEDGGGSGGKSKAVEQVKNAFNKLQEKGIYDAMSEFDIFINYIEAYMTMKIRN

SEQ ID NO: 2430 - protein, 166 aa, synthetic construct
  REGION 1..166: note = Synthetic
SPGQGTQSENSCTHFPGNLPNMLRDLRDAFSRVKTFFQMKDQLDNLLLKESLLEDFKGYLGCQALSEMIQFYLEEVMPQAENQDPDIKAHVNSLGENLKTLRLRLRRCHRFLPCEDGGGSGGKSKAVEQVKNAFNKLQEKGIYDAMSEFDIFINYIEAYMTMKIRN

SEQ ID NO: 2431 - protein, 622 aa, synthetic construct
  REGION 1..622: note = Synthetic
QVQLVQSGAEVTKPGASVKVSCKASGYTFTRYDINWVRQATGQGLEWMGWMNPNSGNSGSVQKFRGRVTMTRDTSITTVYMELSSLRSDDTAVYYCARGGISSSWHWAFDIWGQGTMVTVSSASTKGPSVFPLAPSSKSTSGGTAALGCLVKDYFPEPVTVSWNSGALTSGVHTFPAVLQSSGLYSLSSVVTVPSSSLGTQTYICNVNHKPSNTKVDKKVEPKSCDKTHTCPPCPAPELLGGPSVFLFPPKPKDTLMISRTPEVTCVVVDVSHEDPEVKFNWYVDGVEVHNAKTKPCEEQYGSTYRCVSVLTVLHQDWLNGKEYKCKVSNKALPAPIEKTISKAKGQPREPQVYTLPPSREEMTKNQVSLTCLVKGFYPSDIAVEWESNGQPENNYKTTPPVLDSDGSFFLYSKLTVDKSRWQQGNVFSCSVMHEALHNHYTQKSLSLSPGGGGGSSPGQGTQSENSCTHFPGNLPNMLRDLRDAFSRVKTFFEMKDQLDNLLLKESLLEDFKGYLGCQALSEMIQFYLEEVMPQAENQDPDIKPHVNSLGENLKTLRLRLRRCHRFLPCENGGGSGGKSKAVEQVKNAFNKLQEKGIYKAMSEFDIFINYIEAYMTMKIRN

SEQ ID NO: 2432 - protein, 166 aa, synthetic construct
  REGION 1..166: note = Synthetic
SPGQGTQSENSCTHFPGNLPNMLRDLRDAFSRVKTFFEMKDQLDNLLLKESLLEDFKGYLGCQALSEMIQFYLEEVMPQAENQDPDIKPHVNSLGENLKTLRLRLRRCHRFLPCENGGGSGGKSKAVEQVKNAFNKLQEKGIYKAMSEFDIFINYIEAYMTMKIRN

SEQ ID NO: 2433 - protein, 622 aa, synthetic construct
  REGION 1..622: note = Synthetic
QVQLVQSGAEVTKPGASVKVSCKASGYTFTRYDINWVRQATGQGLEWMGWMNPNSGNSGSVQKFRGRVTMTRDTSITTVYMELSSLRSDDTAVYYCARGGISSSWHWAFDIWGQGTMVTVSSASTKGPSVFPLAPSSKSTSGGTAALGCLVKDYFPEPVTVSWNSGALTSGVHTFPAVLQSSGLYSLSSVVTVPSSSLGTQTYICNVNHKPSNTKVDKKVEPKSCDKTHTCPPCPAPELLGGPSVFLFPPKPKDTLMISRTPEVTCVVVDVSHEDPEVKFNWYVDGVEVHNAKTKPCEEQYGSTYRCVSVLTVLHQDWLNGKEYKCKVSNKALPAPIEKTISKAKGQPREPQVYTLPPSREEMTKNQVSLTCLVKGFYPSDIAVEWESNGQPENNYKTTPPVLDSDGSFFLYSKLTVDKSRWQQGNVFSCSVMHEALHNHYTQKSLSLSPGGGGGSSPGQGTQSENSCTHFPGNLPNMLRDLRDAFSRVKTFFEMKDQLDNLLLKESLLEDFKGYLGCQALSEMIQFYLEEVMPQAENQDPDIKAHVNSLGENLKTLRLRLRRCHRFLPCKNGGGSGGKSKAVEQVKNAFNKLQEKGIYKAMSEFDIFINYIEAYMTMKIRN

SEQ ID NO: 2434 - protein, 166 aa, synthetic construct
  REGION 1..166: note = Synthetic
SPGQGTQSENSCTHFPGNLPNMLRDLRDAFSRVKTFFEMKDQLDNLLLKESLLEDFKGYLGCQALSEMIQFYLEEVMPQAENQDPDIKAHVNSLGENLKTLRLRLRRCHRFLPCKNGGGSGGKSKAVEQVKNAFNKLQEKGIYKAMSEFDIFINYIEAYMTMKIRN

SEQ ID NO: 2435 - protein, 622 aa, synthetic construct
  REGION 1..622: note = Synthetic
QVQLVQSGAEVTKPGASVKVSCKASGYTFTRYDINWVRQATGQGLEWMGWMNPNSGNSGSVQKFRGRVTMTRDTSITTVYMELSSLRSDDTAVYYCARGGISSSWHWAFDIWGQGTMVTVSSASTKGPSVFPLAPSSKSTSGGTAALGCLVKDYFPEPVTVSWNSGALTSGVHTFPAVLQSSGLYSLSSVVTVPSSSLGTQTYICNVNHKPSNTKVDKKVEPKSCDKTHTCPPCPAPELLGGPSVFLFPPKPKDTLMISRTPEVTCVVVDVSHEDPEVKFNWYVDGVEVHNAKTKPCEEQYGSTYRCVSVLTVLHQDWLNGKEYKCKVSNKALPAPIEKTISKAKGQPREPQVYTLPPSREEMTKNQVSLTCLVKGFYPSDIAVEWESNGQPENNYKTTPPVLDSDGSFFLYSKLTVDKSRWQQGNVFSCSVMHEALHNHYTQKSLSLSPGGGGGSSPGQGTQSENSCTHFPGNLPNMLRDLRDAFSRVKTFFEMKDQLDNLLLKESLLEDYKGYLGCQALSEMIQFYLEEVMPQAENQDPDIKAHVNSLGENLKTLRLRLRRCHRFLPCENGGGSGGKSKAVEQVKNAFNKLQEKGIYKAMSEFDIFINYIEAYMTMKIRN

SEQ ID NO: 2436 - protein, 166 aa, synthetic construct
  REGION 1..166: note = Synthetic
SPGQGTQSENSCTHFPGNLPNMLRDLRDAFSRVKTFFEMKDQLDNLLLKESLLEDYKGYLGCQALSEMIQFYLEEVMPQAENQDPDIKAHVNSLGENLKTLRLRLRRCHRFLPCENGGGSGGKSKAVEQVKNAFNKLQEKGIYKAMSEFDIFINYIEAYMTMKIRN

SEQ ID NO: 2437 - protein, 622 aa, synthetic construct
  REGION 1..622: note = Synthetic
QVQLVQSGAEVTKPGASVKVSCKASGYTFTRYDINWVRQATGQGLEWMGWMNPNSGNSGSVQKFRGRVTMTRDTSITTVYMELSSLRSDDTAVYYCARGGISSSWHWAFDIWGQGTMVTVSSASTKGPSVFPLAPSSKSTSGGTAALGCLVKDYFPEPVTVSWNSGALTSGVHTFPAVLQSSGLYSLSSVVTVPSSSLGTQTYICNVNHKPSNTKVDKKVEPKSCDKTHTCPPCPAPELLGGPSVFLFPPKPKDTLMISRTPEVTCVVVDVSHEDPEVKFNWYVDGVEVHNAKTKPCEEQYGSTYRCVSVLTVLHQDWLNGKEYKCKVSNKALPAPIEKTISKAKGQPREPQVYTLPPSREEMTKNQVSLTCLVKGFYPSDIAVEWESNGQPENNYKTTPPVLDSDGSFFLYSKLTVDKSRWQQGNVFSCSVMHEALHNHYTQKSLSLSPGGGGGSSPGQGTQSENSCTHFPGNLPNMLRDLRDAFSRVKTFFEMKDQLDNLLLKESLLEDFKGYLGCQALSEMIQFYLEEVMPQAENQDPDIKAHVNSLGENLKTLRLRLRRCDRFLPCENGGGSGGKSKAVEQVKNAFNKLQEKGIYKAMSEFDIFINYIEAYMTMKIRN

SEQ ID NO: 2438 - protein, 166 aa, synthetic construct
  REGION 1..166: note = Synthetic
SPGQGTQSENSCTHFPGNLPNMLRDLRDAFSRVKTFFEMKDQLDNLLLKESLLEDFKGYLGCQALSEMIQFYLEEVMPQAENQDPDIKAHVNSLGENLKTLRLRLRRCDRFLPCENGGGSGGKSKAVEQVKNAFNKLQEKGIYKAMSEFDIFINYIEAYMTMKIRN

SEQ ID NO: 2439 - protein, 622 aa, synthetic construct
  REGION 1..622: note = Synthetic
QVQLVQSGAEVTKPGASVKVSCKASGYTFTRYDINWVRQATGQGLEWMGWMNPNSGNSGSVQKFRGRVTMTRDTSITTVYMELSSLRSDDTAVYYCARGGISSSWHWAFDIWGQGTMVTVSSASTKGPSVFPLAPSSKSTSGGTAALGCLVKDYFPEPVTVSWNSGALTSGVHTFPAVLQSSGLYSLSSVVTVPSSSLGTQTYICNVNHKPSNTKVDKKVEPKSCDKTHTCPPCPAPELLGGPSVFLFPPKPKDTLMISRTPEVTCVVVDVSHEDPEVKFNWYVDGVEVHNAKTKPCEEQYGSTYRCVSVLTVLHQDWLNGKEYKCKVSNKALPAPIEKTISKAKGQPREPQVYTLPPSREEMTKNQVSLTCLVKGFYPSDIAVEWESNGQPENNYKTTPPVLDSDGSFFLYSKLTVDKSRWQQGNVFSCSVMHEALHNHYTQKSLSLSPGGGGGSSPGQGTQSENSCTHFPGNLPNMLRDLRDAFSRVKTFFEMKDQLDNLLLKESLLEDFNGYLGCQALSEMIQFYLEEVMPQAENQDPDIKAHVNSLGENLKTLRLRLRRCHRFLPCENGGGSGGKSKAVEQVKNAFNKLQEKGIYKAMSEFDIFINYIEAYMTMKIRN

SEQ ID NO: 2440 - protein, 166 aa, synthetic construct
  REGION 1..166: note = Synthetic
SPGQGTQSENSCTHFPGNLPNMLRDLRDAFSRVKTFFEMKDQLDNLLLKESLLEDFNGYLGCQALSEMIQFYLEEVMPQAENQDPDIKAHVNSLGENLKTLRLRLRRCHRFLPCENGGGSGGKSKAVEQVKNAFNKLQEKGIYKAMSEFDIFINYIEAYMTMKIRN

SEQ ID NO: 2441 - protein, 622 aa, synthetic construct
  REGION 1..622: note = Synthetic
QVQLVQSGAEVTKPGASVKVSCKASGYTFTRYDINWVRQATGQGLEWMGWMNPNSGNSGSVQKFRGRVTMTRDTSITTVYMELSSLRSDDTAVYYCARGGISSSWHWAFDIWGQGTMVTVSSASTKGPSVFPLAPSSKSTSGGTAALGCLVKDYFPEPVTVSWNSGALTSGVHTFPAVLQSSGLYSLSSVVTVPSSSLGTQTYICNVNHKPSNTKVDKKVEPKSCDKTHTCPPCPAPELLGGPSVFLFPPKPKDTLMISRTPEVTCVVVDVSHEDPEVKFNWYVDGVEVHNAKTKPCEEQYGSTYRCVSVLTVLHQDWLNGKEYKCKVSNKALPAPIEKTISKAKGQPREPQVYTLPPSREEMTKNQVSLTCLVKGFYPSDIAVEWESNGQPENNYKTTPPVLDSDGSFFLYSKLTVDKSRWQQGNVFSCSVMHEALHNHYTQKSLSLSPGGGGGSSPGQGTQSENSCTHFPGNLPNMLRDLRDAFSRVKTFFEMKDQLDNLLLKESLLEDFKGYLGCQALSEMIQFYLEEVMPQAENQDPDIKAHVNSLGENLKTLRLRLRRCHRFVPCENGGGSGGKSKAVEQVKNAFNKLQEKGIYKAMSEFDIFINYIEAYMTMKIRN

SEQ ID NO: 2442 - protein, 166 aa, synthetic construct
  REGION 1..166: note = Synthetic
SPGQGTQSENSCTHFPGNLPNMLRDLRDAFSRVKTFFEMKDQLDNLLLKESLLEDFKGYLGCQALSEMIQFYLEEVMPQAENQDPDIKAHVNSLGENLKTLRLRLRRCHRFVPCENGGGSGGKSKAVEQVKNAFNKLQEKGIYKAMSEFDIFINYIEAYMTMKIRN

SEQ ID NO: 2443 - protein, 622 aa, synthetic construct
  REGION 1..622: note = Synthetic
QVQLVQSGAEVTKPGASVKVSCKASGYTFTRYDINWVRQATGQGLEWMGWMNPNSGNSGSVQKFRGRVTMTRDTSITTVYMELSSLRSDDTAVYYCARGGISSSWHWAFDIWGQGTMVTVSSASTKGPSVFPLAPSSKSTSGGTAALGCLVKDYFPEPVTVSWNSGALTSGVHTFPAVLQSSGLYSLSSVVTVPSSSLGTQTYICNVNHKPSNTKVDKKVEPKSCDKTHTCPPCPAPELLGGPSVFLFPPKPKDTLMISRTPEVTCVVVDVSHEDPEVKFNWYVDGVEVHNAKTKPCEEQYGSTYRCVSVLTVLHQDWLNGKEYKCKVSNKALPAPIEKTISKAKGQPREPQVYTLPPSREEMTKNQVSLTCLVKGFYPSDIAVEWESNGQPENNYKTTPPVLDSDGSFFLYSKLTVDKSRWQQGNVFSCSVMHEALHNHYTQKSLSLSPGGGGGSSPGQGTQSENSCTHFPGNLPNMLRDLRDAFSRVKTFFEMKDQLDNLLLKESLLEDFKGYQGCQALSEMIQFYLEEVMPQAENQDPDIKAHVNSLGENLKTLRLRLRRCHRFLPCENGGGSGGKSKAVEQVKNAFNKLQEKGIYKAMSEFDIFINYIEAYMTMKIRN

SEQ ID NO: 2444 - protein, 166 aa, synthetic construct
  REGION 1..166: note = Synthetic
SPGQGTQSENSCTHFPGNLPNMLRDLRDAFSRVKTFFEMKDQLDNLLLKESLLEDFKGYQGCQALSEMIQFYLEEVMPQAENQDPDIKAHVNSLGENLKTLRLRLRRCHRFLPCENGGGSGGKSKAVEQVKNAFNKLQEKGIYKAMSEFDIFINYIEAYMTMKIRN

SEQ ID NO: 2445 - protein, 622 aa, synthetic construct
  REGION 1..622: note = Synthetic
QVQLVQSGAEVTKPGASVKVSCKASGYTFTRYDINWVRQATGQGLEWMGWMNPNSGNSGSVQKFRGRVTMTRDTSITTVYMELSSLRSDDTAVYYCARGGISSSWHWAFDIWGQGTMVTVSSASTKGPSVFPLAPSSKSTSGGTAALGCLVKDYFPEPVTVSWNSGALTSGVHTFPAVLQSSGLYSLSSVVTVPSSSLGTQTYICNVNHKPSNTKVDKKVEPKSCDKTHTCPPCPAPELLGGPSVFLFPPKPKDTLMISRTPEVTCVVVDVSHEDPEVKFNWYVDGVEVHNAKTKPCEEQYGSTYRCVSVLTVLHQDWLNGKEYKCKVSNKALPAPIEKTISKAKGQPREPQVYTLPPSREEMTKNQVSLTCLVKGFYPSDIAVEWESNGQPENNYKTTPPVLDSDGSFFLYSKLTVDKSRWQQGNVFSCSVMHEALHNHYTQKSLSLSPGGGGGSSPGQGTQSENSCTHFPGNLPNMLRDLRDAFSRVKTFFEMKDQLDNLLLKESLLEDFKGYLGCQALSEMIQFYLEEVMPQAENQDPDIKAHVNSLGENLKTLRLRLRRCHRFLPCEDGGGSGGKSKAVEQVKNAFNKLQEKGIYKAMSEFDIFINYIEAYMTMKIRN

SEQ ID NO: 2446 - protein, 166 aa, synthetic construct
  REGION 1..166: note = Synthetic
SPGQGTQSENSCTHFPGNLPNMLRDLRDAFSRVKTFFEMKDQLDNLLLKESLLEDFKGYLGCQALSEMIQFYLEEVMPQAENQDPDIKAHVNSLGENLKTLRLRLRRCHRFLPCEDGGGSGGKSKAVEQVKNAFNKLQEKGIYKAMSEFDIFINYIEAYMTMKIRN

SEQ ID NO: 2447 - protein, 622 aa, synthetic construct
  REGION 1..622: note = Synthetic
QVQLVQSGAEVTKPGASVKVSCKASGYTFTRYDINWVRQATGQGLEWMGWMNPNSGNSGSVQKFRGRVTMTRDTSITTVYMELSSLRSDDTAVYYCARGGISSSWHWAFDIWGQGTMVTVSSASTKGPSVFPLAPSSKSTSGGTAALGCLVKDYFPEPVTVSWNSGALTSGVHTFPAVLQSSGLYSLSSVVTVPSSSLGTQTYICNVNHKPSNTKVDKKVEPKSCDKTHTCPPCPAPELLGGPSVFLFPPKPKDTLMISRTPEVTCVVVDVSHEDPEVKFNWYVDGVEVHNAKTKPCEEQYGSTYRCVSVLTVLHQDWLNGKEYKCKVSNKALPAPIEKTISKAKGQPREPQVYTLPPSREEMTKNQVSLTCLVKGFYPSDIAVEWESNGQPENNYKTTPPVLDSDGSFFLYSKLTVDKSRWQQGNVFSCSVMHEALHNHYTQKSLSLSPGGGGGSSPGQGTQSENSCTHFPGNLPNMLRDLRDAFSRVKTFFEMKDQLDNLLLKESLLEDFKGYLGCEALSEMIQFYLEEVMPQAENQDPDIKAHVNSLGENLKTLRLRLRRCHRFLPCENGGGSGGKSKAVEQVKNAFNKLQEKGIYKAMSEFDIFINYIEAYMTMKIRN

SEQ ID NO: 2448 - protein, 166 aa, synthetic construct
  REGION 1..166: note = Synthetic
SPGQGTQSENSCTHFPGNLPNMLRDLRDAFSRVKTFFEMKDQLDNLLLKESLLEDFKGYLGCEALSEMIQFYLEEVMPQAENQDPDIKAHVNSLGENLKTLRLRLRRCHRFLPCENGGGSGGKSKAVEQVKNAFNKLQEKGIYKAMSEFDIFINYIEAYMTMKIRN

SEQ ID NO: 2449 - protein, 622 aa, synthetic construct
  REGION 1..622: note = Synthetic
QVQLVQSGAEVTKPGASVKVSCKASGYTFTRYDINWVRQATGQGLEWMGWMNPNSGNSGSVQKFRGRVTMTRDTSITTVYMELSSLRSDDTAVYYCARGGISSSWHWAFDIWGQGTMVTVSSASTKGPSVFPLAPSSKSTSGGTAALGCLVKDYFPEPVTVSWNSGALTSGVHTFPAVLQSSGLYSLSSVVTVPSSSLGTQTYICNVNHKPSNTKVDKKVEPKSCDKTHTCPPCPAPELLGGPSVFLFPPKPKDTLMISRTPEVTCVVVDVSHEDPEVKFNWYVDGVEVHNAKTKPCEEQYGSTYRCVSVLTVLHQDWLNGKEYKCKVSNKALPAPIEKTISKAKGQPREPQVYTLPPSREEMTKNQVSLTCLVKGFYPSDIAVEWESNGQPENNYKTTPPVLDSDGSFFLYSKLTVDKSRWQQGNVFSCSVMHEALHNHYTQKSLSLSPGGGGGSSPGQGTQSENSCTHFPGNLPNMLRDLRDAFSRVKTFFEMKDQLDNLLLKESLLEDFKGYLGCLALSEMIQFYLEEVMPQAENQDPDIKAHVNSLGENLKTLRLRLRRCHRFLPCENGGGSGGKSKAVEQVKNAFNKLQEKGIYKAMSEFDIFINYIEAYMTMKIRN

SEQ ID NO: 2450 - protein, 166 aa, synthetic construct
  REGION 1..166: note = Synthetic
SPGQGTQSENSCTHFPGNLPNMLRDLRDAFSRVKTFFEMKDQLDNLLLKESLLEDFKGYLGCLALSEMIQFYLEEVMPQAENQDPDIKAHVNSLGENLKTLRLRLRRCHRFLPCENGGGSGGKSKAVEQVKNAFNKLQEKGIYKAMSEFDIFINYIEAYMTMKIRN

SEQ ID NO: 2451 - protein, 622 aa, synthetic construct
  REGION 1..622: note = Synthetic
QVQLVQSGAEVTKPGASVKVSCKASGYTFTRYDINWVRQATGQGLEWMGWMNPNSGNSGSVQKFRGRVTMTRDTSITTVYMELSSLRSDDTAVYYCARGGISSSWHWAFDIWGQGTMVTVSSASTKGPSVFPLAPSSKSTSGGTAALGCLVKDYFPEPVTVSWNSGALTSGVHTFPAVLQSSGLYSLSSVVTVPSSSLGTQTYICNVNHKPSNTKVDKKVEPKSCDKTHTCPPCPAPELLGGPSVFLFPPKPKDTLMISRTPEVTCVVVDVSHEDPEVKFNWYVDGVEVHNAKTKPCEEQYGSTYRCVSVLTVLHQDWLNGKEYKCKVSNKALPAPIEKTISKAKGQPREPQVYTLPPSREEMTKNQVSLTCLVKGFYPSDIAVEWESNGQPENNYKTTPPVLDSDGSFFLYSKLTVDKSRWQQGNVFSCSVMHEALHNHYTQKSLSLSPGGGGGSSPGQGTQSENSCTHFPGNLPNMLRDLRDAFSRVKTFFEMKDQLDNLLLKESLLEDFKGYLGCQALSEMIEFYLEEVMPQAENQDPDIKAHVNSLGENLKTLRLRLRRCHRFLPCENGGGSGGKSKAVEQVKNAFNKLQEKGIYKAMSEFDIFINYIEAYMTMKIRN

SEQ ID NO: 2452 - protein, 166 aa, synthetic construct
  REGION 1..166: note = Synthetic
SPGQGTQSENSCTHFPGNLPNMLRDLRDAFSRVKTFFEMKDQLDNLLLKESLLEDFKGYLGCQALSEMIEFYLEEVMPQAENQDPDIKAHVNSLGENLKTLRLRLRRCHRFLPCENGGGSGGKSKAVEQVKNAFNKLQEKGIYKAMSEFDIFINYIEAYMTMKIRN

SEQ ID NO: 2453 - protein, 622 aa, synthetic construct
  REGION 1..622: note = Synthetic
QVQLVQSGAEVTKPGASVKVSCKASGYTFTRYDINWVRQATGQGLEWMGWMNPNSGNSGSVQKFRGRVTMTRDTSITTVYMELSSLRSDDTAVYYCARGGISSSWHWAFDIWGQGTMVTVSSASTKGPSVFPLAPSSKSTSGGTAALGCLVKDYFPEPVTVSWNSGALTSGVHTFPAVLQSSGLYSLSSVVTVPSSSLGTQTYICNVNHKPSNTKVDKKVEPKSCDKTHTCPPCPAPELLGGPSVFLFPPKPKDTLMISRTPEVTCVVVDVSHEDPEVKFNWYVDGVEVHNAKTKPCEEQYGSTYRCVSVLTVLHQDWLNGKEYKCKVSNKALPAPIEKTISKAKGQPREPQVYTLPPSREEMTKNQVSLTCLVKGFYPSDIAVEWESNGQPENNYKTTPPVLDSDGSFFLYSKLTVDKSRWQQGNVFSCSVMHEALHNHYTQKSLSLSPGGGGGSSPGQGTQSENSCTHFPGNLPNMLRDLRDAFSRVKTFFEMKDQLDNLLLKESLLEDFKGYLGCQALSEMIKFYLEEVMPQAENQDPDIKAHVNSLGENLKTLRLRLRRCHRFLPCENGGGSGGKSKAVEQVKNAFNKLQEKGIYKAMSEFDIFINYIEAYMTMKIRN

SEQ ID NO: 2454 - protein, 166 aa, synthetic construct
  REGION 1..166: note = Synthetic
SPGQGTQSENSCTHFPGNLPNMLRDLRDAFSRVKTFFEMKDQLDNLLLKESLLEDFKGYLGCQALSEMIKFYLEEVMPQAENQDPDIKAHVNSLGENLKTLRLRLRRCHRFLPCENGGGSGGKSKAVEQVKNAFNKLQEKGIYKAMSEFDIFINYIEAYMTMKIRN

SEQ ID NO: 2455 - protein, 622 aa, synthetic construct
  REGION 1..622: note = Synthetic
QVQLVQSGAEVTKPGASVKVSCKASGYTFTRYDINWVRQATGQGLEWMGWMNPNSGNSGSVQKFRGRVTMTRDTSITTVYMELSSLRSDDTAVYYCARGGISSSWHWAFDIWGQGTMVTVSSASTKGPSVFPLAPSSKSTSGGTAALGCLVKDYFPEPVTVSWNSGALTSGVHTFPAVLQSSGLYSLSSVVTVPSSSLGTQTYICNVNHKPSNTKVDKKVEPKSCDKTHTCPPCPAPELLGGPSVFLFPPKPKDTLMISRTPEVTCVVVDVSHEDPEVKFNWYVDGVEVHNAKTKPCEEQYGSTYRCVSVLTVLHQDWLNGKEYKCKVSNKALPAPIEKTISKAKGQPREPQVYTLPPSREEMTKNQVSLTCLVKGFYPSDIAVEWESNGQPENNYKTTPPVLDSDGSFFLYSKLTVDKSRWQQGNVFSCSVMHEALHNHYTQKSLSLSPGGGGGSSPGQGTQSENSCTHFPGNLPNMLRDLRDAFSRVKTFFEMKDQLDNLLLKESLLEDFKGYLGCQALSEMIQFYLEEVMPQAENQDPDIKAHVNSLGENLKTLRLRLRRCHPFLPCENGGGSGGKSKAVEQVKNAFNKLQEKGIYKAMSEFDIFINYIEAYMTMKIRN

SEQ ID NO: 2456 - protein, 166 aa, synthetic construct
  REGION 1..166: note = Synthetic
SPGQGTQSENSCTHFPGNLPNMLRDLRDAFSRVKTFFEMKDQLDNLLLKESLLEDFKGYLGCQALSEMIQFYLEEVMPQAENQDPDIKAHVNSLGENLKTLRLRLRRCHPFLPCENGGGSGGKSKAVEQVKNAFNKLQEKGIYKAMSEFDIFINYIEAYMTMKIRN

SEQ ID NO: 2457 - protein, 622 aa, synthetic construct
  REGION 1..622: note = Synthetic
QVQLVQSGAEVTKPGASVKVSCKASGYTFTRYDINWVRQATGQGLEWMGWMNPNSGNSGSVQKFRGRVTMTRDTSITTVYMELSSLRSDDTAVYYCARGGISSSWHWAFDIWGQGTMVTVSSASTKGPSVFPLAPSSKSTSGGTAALGCLVKDYFPEPVTVSWNSGALTSGVHTFPAVLQSSGLYSLSSVVTVPSSSLGTQTYICNVNHKPSNTKVDKKVEPKSCDKTHTCPPCPAPELLGGPSVFLFPPKPKDTLMISRTPEVTCVVVDVSHEDPEVKFNWYVDGVEVHNAKTKPCEEQYGSTYRCVSVLTVLHQDWLNGKEYKCKVSNKALPAPIEKTISKAKGQPREPQVYTLPPSREEMTKNQVSLTCLVKGFYPSDIAVEWESNGQPENNYKTTPPVLDSDGSFFLYSKLTVDKSRWQQGNVFSCSVMHEALHNHYTQKSLSLSPGGGGGSSPGQGTQSENSCTHFPGNLPNMLRDLRDAFSRVKTFFEMKDQLDNLLLKESLLEDFKGYLGCQALSEMIQFYLEEVMPQAENQDPDIKAHVNSLGENLKTLRLRLRRCHQFLPCENGGGSGGKSKAVEQVKNAFNKLQEKGIYKAMSEFDIFINYIEAYMTMKIRN

SEQ ID NO: 2458 - protein, 166 aa, synthetic construct
  REGION 1..166: note = Synthetic
SPGQGTQSENSCTHFPGNLPNMLRDLRDAFSRVKTFFEMKDQLDNLLLKESLLEDFKGYLGCQALSEMIQFYLEEVMPQAENQDPDIKAHVNSLGENLKTLRLRLRRCHQFLPCENGGGSGGKSKAVEQVKNAFNKLQEKGIYKAMSEFDIFINYIEAYMTMKIRN

SEQ ID NO: 2459 - protein, 622 aa, synthetic construct
  REGION 1..622: note = Synthetic
QVQLVQSGAEVTKPGASVKVSCKASGYTFTRYDINWVRQATGQGLEWMGWMNPNSGNSGSVQKFRGRVTMTRDTSITTVYMELSSLRSDDTAVYYCARGGISSSWHWAFDIWGQGTMVTVSSASTKGPSVFPLAPSSKSTSGGTAALGCLVKDYFPEPVTVSWNSGALTSGVHTFPAVLQSSGLYSLSSVVTVPSSSLGTQTYICNVNHKPSNTKVDKKVEPKSCDKTHTCPPCPAPELLGGPSVFLFPPKPKDTLMISRTPEVTCVVVDVSHEDPEVKFNWYVDGVEVHNAKTKPCEEQYGSTYRCVSVLTVLHQDWLNGKEYKCKVSNKALPAPIEKTISKAKGQPREPQVYTLPPSREEMTKNQVSLTCLVKGFYPSDIAVEWESNGQPENNYKTTPPVLDSDGSFFLYSKLTVDKSRWQQGNVFSCSVMHEALHNHYTQKSLSLSPGGGGGSSPGQGTQSENSCTHFPGNLPNMLRDLRDAFSRVKTFFEMKDQLDNLLLKESLLEDFKGYLGCQALSEMIQFYLEEVMPQAENQDPDIKAHVNSLGENLKTLRLRLRRCHRFLPCENGGGSAGKSKAVEQVKNAFNKLQEKGIYKAMSEFDIFINYIEAYMTMKIRN

SEQ ID NO: 2460 - protein, 166 aa, synthetic construct
  REGION 1..166: note = Synthetic
SPGQGTQSENSCTHFPGNLPNMLRDLRDAFSRVKTFFEMKDQLDNLLLKESLLEDFKGYLGCQALSEMIQFYLEEVMPQAENQDPDIKAHVNSLGENLKTLRLRLRRCHRFLPCENGGGSAGKSKAVEQVKNAFNKLQEKGIYKAMSEFDIFINYIEAYMTMKIRN

SEQ ID NO: 2461 - protein, 622 aa, synthetic construct
  REGION 1..622: note = Synthetic
QVQLVQSGAEVTKPGASVKVSCKASGYTFTRYDINWVRQATGQGLEWMGWMNPNSGNSGSVQKFRGRVTMTRDTSITTVYMELSSLRSDDTAVYYCARGGISSSWHWAFDIWGQGTMVTVSSASTKGPSVFPLAPSSKSTSGGTAALGCLVKDYFPEPVTVSWNSGALTSGVHTFPAVLQSSGLYSLSSVVTVPSSSLGTQTYICNVNHKPSNTKVDKKVEPKSCDKTHTCPPCPAPELLGGPSVFLFPPKPKDTLMISRTPEVTCVVVDVSHEDPEVKFNWYVDGVEVHNAKTKPCEEQYGSTYRCVSVLTVLHQDWLNGKEYKCKVSNKALPAPIEKTISKAKGQPREPQVYTLPPSREEMTKNQVSLTCLVKGFYPSDIAVEWESNGQPENNYKTTPPVLDSDGSFFLYSKLTVDKSRWQQGNVFSCSVMHEALHNHYTQKSLSLSPGGGGGSSPGQGTQSENSCTHFPGNLPNMLRDLRDAFSRVKTFFEMKDQLDNLLLKESLLEDFKGYLGCQALSEMIQFYLEEVMPQAENQDPDIKAHVNSLGENLKTLRLRLRRCHRFLPCENVGGSGGKSKAVEQVKNAFNKLQEKGIYKAMSEFDIFINYIEAYMTMKIRN

SEQ ID NO: 2462 - protein, 166 aa, synthetic construct
  REGION 1..166: note = Synthetic
SPGQGTQSENSCTHFPGNLPNMLRDLRDAFSRVKTFFEMKDQLDNLLLKESLLEDFKGYLGCQALSEMIQFYLEEVMPQAENQDPDIKAHVNSLGENLKTLRLRLRRCHRFLPCENVGGSGGKSKAVEQVKNAFNKLQEKGIYKAMSEFDIFINYIEAYMTMKIRN

SEQ ID NO: 2463 - protein, 622 aa, synthetic construct
  REGION 1..622: note = Synthetic
QVQLVQSGAEVTKPGASVKVSCKASGYTFTRYDINWVRQATGQGLEWMGWMNPNSGNSGSVQKFRGRVTMTRDTSITTVYMELSSLRSDDTAVYYCARGGISSSWHWAFDIWGQGTMVTVSSASTKGPSVFPLAPSSKSTSGGTAALGCLVKDYFPEPVTVSWNSGALTSGVHTFPAVLQSSGLYSLSSVVTVPSSSLGTQTYICNVNHKPSNTKVDKKVEPKSCDKTHTCPPCPAPELLGGPSVFLFPPKPKDTLMISRTPEVTCVVVDVSHEDPEVKFNWYVDGVEVHNAKTKPCEEQYGSTYRCVSVLTVLHQDWLNGKEYKCKVSNKALPAPIEKTISKAKGQPREPQVYTLPPSREEMTKNQVSLTCLVKGFYPSDIAVEWESNGQPENNYKTTPPVLDSDGSFFLYSKLTVDKSRWQQGNVFSCSVMHEALHNHYTQKSLSLSPGGGGGSSPGQGTQSENSCTHFPGNLPNMLRDLRDAFSRVKTFFEMKDQLDNLLLKESLLEDFKGYLGCQALSEMIQFYLEEVMPQAENQDPDIKAHVNSLGENLKTLRLRLRRCHRFLPCENAGGSGGKSKAVEQVKNAFNKLQEKGIYKAMSEFDIFINYIEAYMTMKIRN

SEQ ID NO: 2464 - protein, 166 aa, synthetic construct
  REGION 1..166: note = Synthetic
SPGQGTQSENSCTHFPGNLPNMLRDLRDAFSRVKTFFEMKDQLDNLLLKESLLEDFKGYLGCQALSEMIQFYLEEVMPQAENQDPDIKAHVNSLGENLKTLRLRLRRCHRFLPCENAGGSGGKSKAVEQVKNAFNKLQEKGIYKAMSEFDIFINYIEAYMTMKIRN

SEQ ID NO: 2465 - protein, 622 aa, synthetic construct
  REGION 1..622: note = Synthetic
QVQLVQSGAEVTKPGASVKVSCKASGYTFTRYDINWVRQATGQGLEWMGWMNPNSGNSGSVQKFRGRVTMTRDTSITTVYMELSSLRSDDTAVYYCARGGISSSWHWAFDIWGQGTMVTVSSASTKGPSVFPLAPSSKSTSGGTAALGCLVKDYFPEPVTVSWNSGALTSGVHTFPAVLQSSGLYSLSSVVTVPSSSLGTQTYICNVNHKPSNTKVDKKVEPKSCDKTHTCPPCPAPELLGGPSVFLFPPKPKDTLMISRTPEVTCVVVDVSHEDPEVKFNWYVDGVEVHNAKTKPCEEQYGSTYRCVSVLTVLHQDWLNGKEYKCKVSNKALPAPIEKTISKAKGQPREPQVYTLPPSREEMTKNQVSLTCLVKGFYPSDIAVEWESNGQPENNYKTTPPVLDSDGSFFLYSKLTVDKSRWQQGNVFSCSVMHEALHNHYTQKSLSLSPGGGGGSSPGQGTQSENSCTHFPGNLPNMLRDLRDAFSRVKTFFEMKDQLDNLLLKESLLEDFKGYLGCQALSEMIQFYLEEVMPQAENQDPDIKAHVNSLGENLKTLRLRLRRCHRFLPCENGGGSGGKSKAVEQVKNAFNQLQEKGIYKAMSEFDIFINYIEAYMTMKIRN

SEQ ID NO: 2466 - protein, 166 aa, synthetic construct
  REGION 1..166: note = Synthetic
SPGQGTQSENSCTHFPGNLPNMLRDLRDAFSRVKTFFEMKDQLDNLLLKESLLEDFKGYLGCQALSEMIQFYLEEVMPQAENQDPDIKAHVNSLGENLKTLRLRLRRCHRFLPCENGGGSGGKSKAVEQVKNAFNQLQEKGIYKAMSEFDIFINYIEAYMTMKIRN

SEQ ID NO: 2467 - protein, 622 aa, synthetic construct
  REGION 1..622: note = Synthetic
QVQLVQSGAEVTKPGASVKVSCKASGYTFTRYDINWVRQATGQGLEWMGWMNPNSGNSGSVQKFRGRVTMTRDTSITTVYMELSSLRSDDTAVYYCARGGISSSWHWAFDIWGQGTMVTVSSASTKGPSVFPLAPSSKSTSGGTAALGCLVKDYFPEPVTVSWNSGALTSGVHTFPAVLQSSGLYSLSSVVTVPSSSLGTQTYICNVNHKPSNTKVDKKVEPKSCDKTHTCPPCPAPELLGGPSVFLFPPKPKDTLMISRTPEVTCVVVDVSHEDPEVKFNWYVDGVEVHNAKTKPCEEQYGSTYRCVSVLTVLHQDWLNGKEYKCKVSNKALPAPIEKTISKAKGQPREPQVYTLPPSREEMTKNQVSLTCLVKGFYPSDIAVEWESNGQPENNYKTTPPVLDSDGSFFLYSKLTVDKSRWQQGNVFSCSVMHEALHNHYTQKSLSLSPGGGGGSSPGQGTQSENSCTHFPGNLPNMLRDLRDAFSRVKTFFEMKDQLDNLLLKESLLEDFKGYLGCQALSEMIQFYLEEVMPQAENQDPDIKAHVNSLGENLKTLRLRLRRCHRFLPCENGGGSGGKSKAVEQVKNAFNKLQEKGIYKAMSEFDIFINYIEAYMTMNIRN

SEQ ID NO: 2468 - protein, 166 aa, synthetic construct
  REGION 1..166: note = Synthetic
SPGQGTQSENSCTHFPGNLPNMLRDLRDAFSRVKTFFEMKDQLDNLLLKESLLEDFKGYLGCQALSEMIQFYLEEVMPQAENQDPDIKAHVNSLGENLKTLRLRLRRCHRFLPCENGGGSGGKSKAVEQVKNAFNKLQEKGIYKAMSEFDIFINYIEAYMTMNIRN

SEQ ID NO: 2469 - protein, 622 aa, synthetic construct
  REGION 1..622: note = Synthetic
QVQLVQSGAEVTKPGASVKVSCKASGYTFTRYDINWVRQATGQGLEWMGWMNPNSGNSGSVQKFRGRVTMTRDTSITTVYMELSSLRSDDTAVYYCARGGISSSWHWAFDIWGQGTMVTVSSASTKGPSVFPLAPSSKSTSGGTAALGCLVKDYFPEPVTVSWNSGALTSGVHTFPAVLQSSGLYSLSSVVTVPSSSLGTQTYICNVNHKPSNTKVDKKVEPKSCDKTHTCPPCPAPELLGGPSVFLFPPKPKDTLMISRTPEVTCVVVDVSHEDPEVKFNWYVDGVEVHNAKTKPCEEQYGSTYRCVSVLTVLHQDWLNGKEYKCKVSNKALPAPIEKTISKAKGQPREPQVYTLPPSREEMTKNQVSLTCLVKGFYPSDIAVEWESNGQPENNYKTTPPVLDSDGSFFLYSKLTVDKSRWQQGNVFSCSVMHEALHNHYTQKSLSLSPGGGGGSSPGQGTQSENSCTHFPGNLPNMLRDLRDAFSRVKTFFEMKDQLDNLLLKESLLEDFKGYLGCQALSEMIQFYLEEVMPQAENQDPDIKAHVNSLGENLKTLRLRLRRCHRFLPCENGGGSGGKSKAVEQVKNAFNKLQEKGIYKAMSEFDIFINYIEAYVTMKIRN

SEQ ID NO: 2470 - protein, 166 aa, synthetic construct
  REGION 1..166: note = Synthetic
SPGQGTQSENSCTHFPGNLPNMLRDLRDAFSRVKTFFEMKDQLDNLLLKESLLEDFKGYLGCQALSEMIQFYLEEVMPQAENQDPDIKAHVNSLGENLKTLRLRLRRCHRFLPCENGGGSGGKSKAVEQVKNAFNKLQEKGIYKAMSEFDIFINYIEAYVTMKIRN

SEQ ID NO: 2471 - protein, 622 aa, synthetic construct
  REGION 1..622: note = Synthetic
QVQLVQSGAEVTKPGASVKVSCKASGYTFTRYDINWVRQATGQGLEWMGWMNPNSGNSGSVQKFRGRVTMTRDTSITTVYMELSSLRSDDTAVYYCARGGISSSWHWAFDIWGQGTMVTVSSASTKGPSVFPLAPSSKSTSGGTAALGCLVKDYFPEPVTVSWNSGALTSGVHTFPAVLQSSGLYSLSSVVTVPSSSLGTQTYICNVNHKPSNTKVDKKVEPKSCDKTHTCPPCPAPELLGGPSVFLFPPKPKDTLMISRTPEVTCVVVDVSHEDPEVKFNWYVDGVEVHNAKTKPCEEQYGSTYRCVSVLTVLHQDWLNGKEYKCKVSNKALPAPIEKTISKAKGQPREPQVYTLPPSREEMTKNQVSLTCLVKGFYPSDIAVEWESNGQPENNYKTTPPVLDSDGSFFLYSKLTVDKSRWQQGNVFSCSVMHEALHNHYTQKSLSLSPGGGGGSSPGQGTQSENSCTHFPGNLPNMLRDLRDAFSRVKTFFQMKDQLDNLLLKESLLEDFKGYLGCEALSEMIQFYLEEVMPQAENQDPDIKAHVNSLGENLKTLRLRLRRCHRFLPCENGGGSGGKSKAVEQVKNAFNKLQEKGIYKAMSEFDIFINYIEAYMTMKIRN

SEQ ID NO: 2472 - protein, 166 aa, synthetic construct
  REGION 1..166: note = Synthetic
SPGQGTQSENSCTHFPGNLPNMLRDLRDAFSRVKTFFQMKDQLDNLLLKESLLEDFKGYLGCEALSEMIQFYLEEVMPQAENQDPDIKAHVNSLGENLKTLRLRLRRCHRFLPCENGGGSGGKSKAVEQVKNAFNKLQEKGIYKAMSEFDIFINYIEAYMTMKIRN

SEQ ID NO: 2473 - protein, 622 aa, synthetic construct
  REGION 1..622: note = Synthetic
QVQLVQSGAEVTKPGASVKVSCKASGYTFTRYDINWVRQATGQGLEWMGWMNPNSGNSGSVQKFRGRVTMTRDTSITTVYMELSSLRSDDTAVYYCARGGISSSWHWAFDIWGQGTMVTVSSASTKGPSVFPLAPSSKSTSGGTAALGCLVKDYFPEPVTVSWNSGALTSGVHTFPAVLQSSGLYSLSSVVTVPSSSLGTQTYICNVNHKPSNTKVDKKVEPKSCDKTHTCPPCPAPELLGGPSVFLFPPKPKDTLMISRTPEVTCVVVDVSHEDPEVKFNWYVDGVEVHNAKTKPCEEQYGSTYRCVSVLTVLHQDWLNGKEYKCKVSNKALPAPIEKTISKAKGQPREPQVYTLPPSREEMTKNQVSLTCLVKGFYPSDIAVEWESNGQPENNYKTTPPVLDSDGSFFLYSKLTVDKSRWQQGNVFSCSVMHEALHNHYTQKSLSLSPGGGGGSSPGQGTQSENSCTHFPGNLPNMLRDLRDAFSRVKTFFQMKDQLDNLLLKESLLEDFKGYLGCEALSEMIQFYLEEVMPQAENQDPDIKAHVNSLGENLKTLRLRLRRCHRFLPCENGGGSGGKSKAVEQVKNAFNKLQEKGIYDAMSEFDIFINYIEAYMTMKIRN

SEQ ID NO: 2474 - protein, 166 aa, synthetic construct
  REGION 1..166: note = Synthetic
SPGQGTQSENSCTHFPGNLPNMLRDLRDAFSRVKTFFQMKDQLDNLLLKESLLEDFKGYLGCEALSEMIQFYLEEVMPQAENQDPDIKAHVNSLGENLKTLRLRLRRCHRFLPCENGGGSGGKSKAVEQVKNAFNKLQEKGIYDAMSEFDIFINYIEAYMTMKIRN

SEQ ID NO: 2475 - protein, 622 aa, synthetic construct
  REGION 1..622: note = Synthetic
QVQLVQSGAEVTKPGASVKVSCKASGYTFTRYDINWVRQATGQGLEWMGWMNPNSGNSGSVQKFRGRVTMTRDTSITTVYMELSSLRSDDTAVYYCARGGISSSWHWAFDIWGQGTMVTVSSASTKGPSVFPLAPSSKSTSGGTAALGCLVKDYFPEPVTVSWNSGALTSGVHTFPAVLQSSGLYSLSSVVTVPSSSLGTQTYICNVNHKPSNTKVDKKVEPKSCDKTHTCPPCPAPELLGGPSVFLFPPKPKDTLMISRTPEVTCVVVDVSHEDPEVKFNWYVDGVEVHNAKTKPCEEQYGSTYRCVSVLTVLHQDWLNGKEYKCKVSNKALPAPIEKTISKAKGQPREPQVYTLPPSREEMTKNQVSLTCLVKGFYPSDIAVEWESNGQPENNYKTTPPVLDSDGSFFLYSKLTVDKSRWQQGNVFSCSVMHEALHNHYTQKSLSLSPGGGGGSSPGQGTQSENSCTHFPGNLPNMLRDLRDAFSRVKTFFQMKDQLDNLLLKESLLEDFKGYLGCLALSEMIQFYLEEVMPQAENQDPDIKAHVNSLGENLKTLRLRLRRCHRFLPCENGGGSGGKSKAVEQVKNAFNKLQEKGIYKAMSEFDIFINYIEAYMTMKIRN

SEQ ID NO: 2476 - protein, 166 aa, synthetic construct
  REGION 1..166: note = Synthetic
SPGQGTQSENSCTHFPGNLPNMLRDLRDAFSRVKTFFQMKDQLDNLLLKESLLEDFKGYLGCLALSEMIQFYLEEVMPQAENQDPDIKAHVNSLGENLKTLRLRLRRCHRFLPCENGGGSGGKSKAVEQVKNAFNKLQEKGIYKAMSEFDIFINYIEAYMTMKIRN

SEQ ID NO: 2477 - protein, 622 aa, synthetic construct
  REGION 1..622: note = Synthetic
QVQLVQSGAEVTKPGASVKVSCKASGYTFTRYDINWVRQATGQGLEWMGWMNPNSGNSGSVQKFRGRVTMTRDTSITTVYMELSSLRSDDTAVYYCARGGISSSWHWAFDIWGQGTMVTVSSASTKGPSVFPLAPSSKSTSGGTAALGCLVKDYFPEPVTVSWNSGALTSGVHTFPAVLQSSGLYSLSSVVTVPSSSLGTQTYICNVNHKPSNTKVDKKVEPKSCDKTHTCPPCPAPELLGGPSVFLFPPKPKDTLMISRTPEVTCVVVDVSHEDPEVKFNWYVDGVEVHNAKTKPCEEQYGSTYRCVSVLTVLHQDWLNGKEYKCKVSNKALPAPIEKTISKAKGQPREPQVYTLPPSREEMTKNQVSLTCLVKGFYPSDIAVEWESNGQPENNYKTTPPVLDSDGSFFLYSKLTVDKSRWQQGNVFSCSVMHEALHNHYTQKSLSLSPGGGGGSSPGQGTQSENSCTHFPGNLPNMLRDLRDAFSRVKTFFQMKDQLDNLLLKESLLEDFKGYLGCLALSEMIQFYLEEVMPQAENQDPDIKAHVNSLGENLKTLRLRLRRCHRFLPCENGGGSGGKSKAVEQVKNAFNKLQEKGIYDAMSEFDIFINYIEAYMTMKIRN

SEQ ID NO: 2478 - protein, 166 aa, synthetic construct
  REGION 1..166: note = Synthetic
SPGQGTQSENSCTHFPGNLPNMLRDLRDAFSRVKTFFQMKDQLDNLLLKESLLEDFKGYLGCLALSEMIQFYLEEVMPQAENQDPDIKAHVNSLGENLKTLRLRLRRCHRFLPCENGGGSGGKSKAVEQVKNAFNKLQEKGIYDAMSEFDIFINYIEAYMTMKIRN

SEQ ID NO: 2479 - protein, 622 aa, synthetic construct
  REGION 1..622: note = Synthetic
QVQLVQSGAEVTKPGASVKVSCKASGYTFTRYDINWVRQATGQGLEWMGWMNPNSGNSGSVQKFRGRVTMTRDTSITTVYMELSSLRSDDTAVYYCARGGISSSWHWAFDIWGQGTMVTVSSASTKGPSVFPLAPSSKSTSGGTAALGCLVKDYFPEPVTVSWNSGALTSGVHTFPAVLQSSGLYSLSSVVTVPSSSLGTQTYICNVNHKPSNTKVDKKVEPKSCDKTHTCPPCPAPELLGGPSVFLFPPKPKDTLMISRTPEVTCVVVDVSHEDPEVKFNWYVDGVEVHNAKTKPCEEQYGSTYRCVSVLTVLHQDWLNGKEYKCKVSNKALPAPIEKTISKAKGQPREPQVYTLPPSREEMTKNQVSLTCLVKGFYPSDIAVEWESNGQPENNYKTTPPVLDSDGSFFLYSKLTVDKSRWQQGNVFSCSVMHEALHNHYTQKSLSLSPGGGGGSSPGQGTQSENSCTHFPGNLPNMLRDLRDAFSRVKTFFQMKDQLDNLLLKESLLEDFKGYLGCQALSEMIEFYLEEVMPQAENQDPDIKAHVNSLGENLKTLRLRLRRCHRFLPCENGGGSGGKSKAVEQVKNAFNKLQEKGIYKAMSEFDIFINYIEAYMTMKIRN

SEQ ID NO: 2480 - protein, 166 aa, synthetic construct
  REGION 1..166: note = Synthetic
SPGQGTQSENSCTHFPGNLPNMLRDLRDAFSRVKTFFQMKDQLDNLLLKESLLEDFKGYLGCQALSEMIEFYLEEVMPQAENQDPDIKAHVNSLGENLKTLRLRLRRCHRFLPCENGGGSGGKSKAVEQVKNAFNKLQEKGIYKAMSEFDIFINYIEAYMTMKIRN

SEQ ID NO: 2481 - protein, 622 aa, synthetic construct
  REGION 1..622: note = Synthetic
QVQLVQSGAEVTKPGASVKVSCKASGYTFTRYDINWVRQATGQGLEWMGWMNPNSGNSGSVQKFRGRVTMTRDTSITTVYMELSSLRSDDTAVYYCARGGISSSWHWAFDIWGQGTMVTVSSASTKGPSVFPLAPSSKSTSGGTAALGCLVKDYFPEPVTVSWNSGALTSGVHTFPAVLQSSGLYSLSSVVTVPSSSLGTQTYICNVNHKPSNTKVDKKVEPKSCDKTHTCPPCPAPELLGGPSVFLFPPKPKDTLMISRTPEVTCVVVDVSHEDPEVKFNWYVDGVEVHNAKTKPCEEQYGSTYRCVSVLTVLHQDWLNGKEYKCKVSNKALPAPIEKTISKAKGQPREPQVYTLPPSREEMTKNQVSLTCLVKGFYPSDIAVEWESNGQPENNYKTTPPVLDSDGSFFLYSKLTVDKSRWQQGNVFSCSVMHEALHNHYTQKSLSLSPGGGGGSSPGQGTQSENSCTHFPGNLPNMLRDLRDAFSRVKTFFQMKDQLDNLLLKESLLEDFKGYLGCQALSEMIEFYLEEVMPQAENQDPDIKAHVNSLGENLKTLRLRLRRCHRFLPCENGGGSGGKSKAVEQVKNAFNKLQEKGIYDAMSEFDIFINYIEAYMTMKIRN

SEQ ID NO: 2482 - protein, 166 aa, synthetic construct
  REGION 1..166: note = Synthetic
SPGQGTQSENSCTHFPGNLPNMLRDLRDAFSRVKTFFQMKDQLDNLLLKESLLEDFKGYLGCQALSEMIEFYLEEVMPQAENQDPDIKAHVNSLGENLKTLRLRLRRCHRFLPCENGGGSGGKSKAVEQVKNAFNKLQEKGIYDAMSEFDIFINYIEAYMTMKIRN

SEQ ID NO: 2483 - protein, 622 aa, synthetic construct
  REGION 1..622: note = Synthetic
QVQLVQSGAEVTKPGASVKVSCKASGYTFTRYDINWVRQATGQGLEWMGWMNPNSGNSGSVQKFRGRVTMTRDTSITTVYMELSSLRSDDTAVYYCARGGISSSWHWAFDIWGQGTMVTVSSASTKGPSVFPLAPSSKSTSGGTAALGCLVKDYFPEPVTVSWNSGALTSGVHTFPAVLQSSGLYSLSSVVTVPSSSLGTQTYICNVNHKPSNTKVDKKVEPKSCDKTHTCPPCPAPELLGGPSVFLFPPKPKDTLMISRTPEVTCVVVDVSHEDPEVKFNWYVDGVEVHNAKTKPCEEQYGSTYRCVSVLTVLHQDWLNGKEYKCKVSNKALPAPIEKTISKAKGQPREPQVYTLPPSREEMTKNQVSLTCLVKGFYPSDIAVEWESNGQPENNYKTTPPVLDSDGSFFLYSKLTVDKSRWQQGNVFSCSVMHEALHNHYTQKSLSLSPGGGGGSSPGQGTQSENSCTHFPGNLPNMLRDLRDAFSRVKTFFQMKDQLDNLLLKESLLEDFKGYLGCQALSEMIKFYLEEVMPQAENQDPDIKAHVNSLGENLKTLRLRLRRCHRFLPCENGGGSGGKSKAVEQVKNAFNKLQEKGIYKAMSEFDIFINYIEAYMTMKIRN

SEQ ID NO: 2484 - protein, 166 aa, synthetic construct
  REGION 1..166: note = Synthetic
SPGQGTQSENSCTHFPGNLPNMLRDLRDAFSRVKTFFQMKDQLDNLLLKESLLEDFKGYLGCQALSEMIKFYLEEVMPQAENQDPDIKAHVNSLGENLKTLRLRLRRCHRFLPCENGGGSGGKSKAVEQVKNAFNKLQEKGIYKAMSEFDIFINYIEAYMTMKIRN

SEQ ID NO: 2485 - protein, 622 aa, synthetic construct
  REGION 1..622: note = Synthetic
QVQLVQSGAEVTKPGASVKVSCKASGYTFTRYDINWVRQATGQGLEWMGWMNPNSGNSGSVQKFRGRVTMTRDTSITTVYMELSSLRSDDTAVYYCARGGISSSWHWAFDIWGQGTMVTVSSASTKGPSVFPLAPSSKSTSGGTAALGCLVKDYFPEPVTVSWNSGALTSGVHTFPAVLQSSGLYSLSSVVTVPSSSLGTQTYICNVNHKPSNTKVDKKVEPKSCDKTHTCPPCPAPELLGGPSVFLFPPKPKDTLMISRTPEVTCVVVDVSHEDPEVKFNWYVDGVEVHNAKTKPCEEQYGSTYRCVSVLTVLHQDWLNGKEYKCKVSNKALPAPIEKTISKAKGQPREPQVYTLPPSREEMTKNQVSLTCLVKGFYPSDIAVEWESNGQPENNYKTTPPVLDSDGSFFLYSKLTVDKSRWQQGNVFSCSVMHEALHNHYTQKSLSLSPGGGGGSSPGQGTQSENSCTHFPGNLPNMLRDLRDAFSRVKTFFQMKDQLDNLLLKESLLEDFKGYLGCQALSEMIKFYLEEVMPQAENQDPDIKAHVNSLGENLKTLRLRLRRCHRFLPCENGGGSGGKSKAVEQVKNAFNKLQEKGIYDAMSEFDIFINYIEAYMTMKIRN

SEQ ID NO: 2486 - protein, 166 aa, synthetic construct
  REGION 1..166: note = Synthetic
SPGQGTQSENSCTHFPGNLPNMLRDLRDAFSRVKTFFQMKDQLDNLLLKESLLEDFKGYLGCQALSEMIKFYLEEVMPQAENQDPDIKAHVNSLGENLKTLRLRLRRCHRFLPCENGGGSGGKSKAVEQVKNAFNKLQEKGIYDAMSEFDIFINYIEAYMTMKIRN

SEQ ID NO: 2487 - protein, 622 aa, synthetic construct
  REGION 1..622: note = Synthetic
QVQLVQSGAEVTKPGASVKVSCKASGYTFTRYDINWVRQATGQGLEWMGWMNPNSGNSGSVQKFRGRVTMTRDTSITTVYMELSSLRSDDTAVYYCARGGISSSWHWAFDIWGQGTMVTVSSASTKGPSVFPLAPSSKSTSGGTAALGCLVKDYFPEPVTVSWNSGALTSGVHTFPAVLQSSGLYSLSSVVTVPSSSLGTQTYICNVNHKPSNTKVDKKVEPKSCDKTHTCPPCPAPELLGGPSVFLFPPKPKDTLMISRTPEVTCVVVDVSHEDPEVKFNWYVDGVEVHNAKTKPCEEQYGSTYRCVSVLTVLHQDWLNGKEYKCKVSNKALPAPIEKTISKAKGQPREPQVYTLPPSREEMTKNQVSLTCLVKGFYPSDIAVEWESNGQPENNYKTTPPVLDSDGSFFLYSKLTVDKSRWQQGNVFSCSVMHEALHNHYTQKSLSLSPGGGGGSSPGQGTQSENSCTHFPGNLPNMLRDLRDAFSRVKTFFQMKDQLDNLLLKESLLEDFKGYLGCQALSEMIQFYLEEVMPQAENQDPDIKAHVNSLGENLKTLRLRLRRCHPFLPCENGGGSGGKSKAVEQVKNAFNKLQEKGIYKAMSEFDIFINYIEAYMTMKIRN

SEQ ID NO: 2488 - protein, 166 aa, synthetic construct
  REGION 1..166: note = Synthetic
SPGQGTQSENSCTHFPGNLPNMLRDLRDAFSRVKTFFQMKDQLDNLLLKESLLEDFKGYLGCQALSEMIQFYLEEVMPQAENQDPDIKAHVNSLGENLKTLRLRLRRCHPFLPCENGGGSGGKSKAVEQVKNAFNKLQEKGIYKAMSEFDIFINYIEAYMTMKIRN

SEQ ID NO: 2489 - protein, 622 aa, synthetic construct
  REGION 1..622: note = Synthetic
QVQLVQSGAEVTKPGASVKVSCKASGYTFTRYDINWVRQATGQGLEWMGWMNPNSGNSGSVQKFRGRVTMTRDTSITTVYMELSSLRSDDTAVYYCARGGISSSWHWAFDIWGQGTMVTVSSASTKGPSVFPLAPSSKSTSGGTAALGCLVKDYFPEPVTVSWNSGALTSGVHTFPAVLQSSGLYSLSSVVTVPSSSLGTQTYICNVNHKPSNTKVDKKVEPKSCDKTHTCPPCPAPELLGGPSVFLFPPKPKDTLMISRTPEVTCVVVDVSHEDPEVKFNWYVDGVEVHNAKTKPCEEQYGSTYRCVSVLTVLHQDWLNGKEYKCKVSNKALPAPIEKTISKAKGQPREPQVYTLPPSREEMTKNQVSLTCLVKGFYPSDIAVEWESNGQPENNYKTTPPVLDSDGSFFLYSKLTVDKSRWQQGNVFSCSVMHEALHNHYTQKSLSLSPGGGGGSSPGQGTQSENSCTHFPGNLPNMLRDLRDAFSRVKTFFQMKDQLDNLLLKESLLEDFKGYLGCQALSEMIQFYLEEVMPQAENQDPDIKAHVNSLGENLKTLRLRLRRCHPFLPCENGGGSGGKSKAVEQVKNAFNKLQEKGIYDAMSEFDIFINYIEAYMTMKIRN

SEQ ID NO: 2490 - protein, 166 aa, synthetic construct
  REGION 1..166: note = Synthetic
SPGQGTQSENSCTHFPGNLPNMLRDLRDAFSRVKTFFQMKDQLDNLLLKESLLEDFKGYLGCQALSEMIQFYLEEVMPQAENQDPDIKAHVNSLGENLKTLRLRLRRCHPFLPCENGGGSGGKSKAVEQVKNAFNKLQEKGIYDAMSEFDIFINYIEAYMTMKIRN

SEQ ID NO: 2491 - protein, 622 aa, synthetic construct
  REGION 1..622: note = Synthetic
QVQLVQSGAEVTKPGASVKVSCKASGYTFTRYDINWVRQATGQGLEWMGWMNPNSGNSGSVQKFRGRVTMTRDTSITTVYMELSSLRSDDTAVYYCARGGISSSWHWAFDIWGQGTMVTVSSASTKGPSVFPLAPSSKSTSGGTAALGCLVKDYFPEPVTVSWNSGALTSGVHTFPAVLQSSGLYSLSSVVTVPSSSLGTQTYICNVNHKPSNTKVDKKVEPKSCDKTHTCPPCPAPELLGGPSVFLFPPKPKDTLMISRTPEVTCVVVDVSHEDPEVKFNWYVDGVEVHNAKTKPCEEQYGSTYRCVSVLTVLHQDWLNGKEYKCKVSNKALPAPIEKTISKAKGQPREPQVYTLPPSREEMTKNQVSLTCLVKGFYPSDIAVEWESNGQPENNYKTTPPVLDSDGSFFLYSKLTVDKSRWQQGNVFSCSVMHEALHNHYTQKSLSLSPGGGGGSSPGQGTQSENSCTHFPGNLPNMLRDLRDAFSRVKTFFQMKDQLDNLLLKESLLEDFKGYLGCQALSEMIQFYLEEVMPQAENQDPDIKAHVNSLGENLKTLRLRLRRCHQFLPCENGGGSGGKSKAVEQVKNAFNKLQEKGIYKAMSEFDIFINYIEAYMTMKIRN

SEQ ID NO: 2492 - protein, 166 aa, synthetic construct
  REGION 1..166: note = Synthetic
SPGQGTQSENSCTHFPGNLPNMLRDLRDAFSRVKTFFQMKDQLDNLLLKESLLEDFKGYLGCQALSEMIQFYLEEVMPQAENQDPDIKAHVNSLGENLKTLRLRLRRCHQFLPCENGGGSGGKSKAVEQVKNAFNKLQEKGIYKAMSEFDIFINYIEAYMTMKIRN

SEQ ID NO: 2493 - protein, 622 aa, synthetic construct
  REGION 1..622: note = Synthetic
QVQLVQSGAEVTKPGASVKVSCKASGYTFTRYDINWVRQATGQGLEWMGWMNPNSGNSGSVQKFRGRVTMTRDTSITTVYMELSSLRSDDTAVYYCARGGISSSWHWAFDIWGQGTMVTVSSASTKGPSVFPLAPSSKSTSGGTAALGCLVKDYFPEPVTVSWNSGALTSGVHTFPAVLQSSGLYSLSSVVTVPSSSLGTQTYICNVNHKPSNTKVDKKVEPKSCDKTHTCPPCPAPELLGGPSVFLFPPKPKDTLMISRTPEVTCVVVDVSHEDPEVKFNWYVDGVEVHNAKTKPCEEQYGSTYRCVSVLTVLHQDWLNGKEYKCKVSNKALPAPIEKTISKAKGQPREPQVYTLPPSREEMTKNQVSLTCLVKGFYPSDIAVEWESNGQPENNYKTTPPVLDSDGSFFLYSKLTVDKSRWQQGNVFSCSVMHEALHNHYTQKSLSLSPGGGGGSSPGQGTQSENSCTHFPGNLPNMLRDLRDAFSRVKTFFQMKDQLDNLLLKESLLEDFKGYLGCQALSEMIQFYLEEVMPQAENQDPDIKAHVNSLGENLKTLRLRLRRCHRFLPCENGGGSGGKSKAVEQVKNAFNKLQEKGIYDAMSEFDIFINYIEAYMTMKIRN

SEQ ID NO: 2494 - protein, 166 aa, synthetic construct; identical to SEQ ID NO: 5
  REGION 1..166: note = Synthetic

SEQ ID NO: 2495 - protein, 622 aa, synthetic construct; identical to SEQ ID NO: 2475
  REGION 1..622: note = Synthetic

SEQ ID NO: 2496 - protein, 166 aa, synthetic construct; identical to SEQ ID NO: 2476
  REGION 1..166: note = Synthetic

SEQ ID NO: 2497 - protein, 622 aa, synthetic construct
  REGION 1..622: note = Synthetic
SPGQGTQSENSCTHFPGNLPNMLRDLRDAFSRVKTFFQMKDQLDNKLLKESLLEDFKGYLGCQALSEMIQFYLEEVMPQAENQDPDIKAHVNSLGENLKTLRLRLRRCHRFLPCENGGGSGGKSKAVEQVKNAFNKLQEKGIYKAMSEFDIFINYIEAYMTMKIRNGGGGSQVQLVQSGAEVTKPGASVKVSCKASGYTFTRYDINWVRQATGQGLEWMGWMNPNSGNSGSVQKFRGRVTMTRDTSITTVYMELSSLRSDDTAVYYCARGGISSSWHWAFDIWGQGTMVTVSSASTKGPSVFPLAPSSKSTSGGTAALGCLVKDYFPEPVTVSWNSGALTSGVHTFPAVLQSSGLYSLSSVVTVPSSSLGTQTYICNVNHKPSNTKVDKKVEPKSCDKTHTCPPCPAPELLGGPSVFLFPPKPKDTLMISRTPEVTCVVVDVSHEDPEVKFNWYVDGVEVHNAKTKPCEEQYGSTYRCVSVLTVLHQDWLNGKEYKCKVSNKALPAPIEKTISKAKGQPREPQVYTLPPSRKEMTKNQVSLTCLVKGFYPSDIAVEWESNGQPENNYKTTPPVLKSDGSFFLYSKLTVDKSRWQQGNVFSCSVMHEALHNHYTQKSLSLSPG

SEQ ID NO: 2498 - protein, 622 aa, synthetic construct
  REGION 1..622: note = Synthetic
SPGQGTQSENSCTHFPGNLPNMLRDLRDAFSRVKTFFQMKDQLDNKLLKESLLEDFKGYLGCQALSEMIQFYLEEVMPQAENQDPDIKAHVNSLGENLKTLRLRLRRCHRFLPCENGGGSGGKSKAVEQVKNAFNKLQEKGIYKAMSEFDIFINYIEAYMTMKIRNGGGGSQVQLVQSGAEVTKPGASVKVSCKASGYTFTRYDINWVRQATGQGLEWMGWMNPNSGNSGSVQKFRGRVTMTRDTSITTVYMELSSLRSDDTAVYYCARGGISSSWHWAFDIWGQGTMVTVSSASTKGPSVFPLAPSSKSTSGGTAALGCLVKDYFPEPVTVSWNSGALTSGVHTFPAVLQSSGLYSLSSVVTVPSSSLGTQTYICNVNHKPSNTKVDKKVEPKSCDKTHTCPPCPAPELLGGPSVFLFPPKPKDTLMISRTPEVTCVVVDVSHEDPEVKFNWYVDGVEVHNAKTKPCEEQYGSTYRCVSVLTVLHQDWLNGKEYKCKVSNKALPAPIEKTISKAKGQPREPQVYTLPPSREEMTKNQVSLTCLVKGFYPSDIAVEWESNGQPENNYKTTPPVLDSDGSFFLYSKLTVDKSRWQQGNVFSCSVMHEALHNHYTQKSLSLSPG

SEQ ID NO: 2499 - protein, 622 aa, synthetic construct; identical to SEQ ID NO: 2009
  REGION 1..622: note = Synthetic

SEQ ID NO: 2500 - protein, 166 aa, synthetic construct
  REGION 1..166: note = Synthetic
SPGQGTQSENSCTHYPGNLPNMLRDLRDAFSRVKTFFQMKDQLDNKLLKESLLEDFKGYLGCQALSEMIQFYLEEVMPQAENQDPDIKAHVNSLGENLKTLRLRLRRCHRFLPCENGGGSGGKSKAVEQVKNAFNKLQEKGIYKAMSEFDIFINYIEAYMTMKIRN

SEQ ID NO: 2501 - protein, 622 aa, synthetic construct
  REGION 1..622: note = Synthetic
QVQLVQSGAEVTKPGASVKVSCKASGYTFTRYDINWVRQATGQGLEWMGWMNPNSGNSGSVQKFRGRVTMTRDTSITTVYMELSSLRSDDTAVYYCARGGISSSWHWAFDIWGQGTMVTVSSASTKGPSVFPLAPSSKSTSGGTAALGCLVKDYFPEPVTVSWNSGALTSGVHTFPAVLQSSGLYSLSSVVTVPSSSLGTQTYICNVNHKPSNTKVDKKVEPKSCDKTHTCPPCPAPELLGGPSVFLFPPKPKDTLMISRTPEVTCVVVDVSHEDPEVKFNWYVDGVEVHNAKTKPCEEQYGSTYRCVSVLTVLHQDWLNGKEYKCKVSNKALPAPIEKTISKAKGQPREPQVYTLPPSREEMTKNQVSLTCLVKGFYPSDIAVEWESNGQPENNYKTTPPVLDSDGSFFLYSKLTVDKSRWQQGNVFSCSVMHEALHNHYTQKSLSLSPGGGGGSSPGQGTQSENSCTHFPGNLPNMLRDLRDAFSRVKTFFQMCDQLDNKLLKESLLEDFKGYLGCQALSEMIQFYLEEVMPQAENQDPDIKAHVNSLGENLKTLRLRLRRCHRFLPCENGGGSGGKSKAVEQVKNAFNKLQEKGICKAMSEFDIFINYIEAYMTMKIRN

SEQ ID NO: 2502 - protein, 166 aa, synthetic construct
  REGION 1..166: note = Synthetic
SPGQGTQSENSCTHFPGNLPNMLRDLRDAFSRVKTFFQMCDQLDNKLLKESLLEDFKGYLGCQALSEMIQFYLEEVMPQAENQDPDIKAHVNSLGENLKTLRLRLRRCHRFLPCENGGGSGGKSKAVEQVKNAFNKLQEKGICKAMSEFDIFINYIEAYMTMKIRN

SEQ ID NO: 2503 - protein, 622 aa, synthetic construct
  REGION 1..622: note = Synthetic
QVQLVQSGAEVTKPGASVKVSCKASGYTFTRYDINWVRQATGQGLEWMGWMNPNSGNSGSVQKFRGRVTMTRDTSITTVYMELSSLRSDDTAVYYCARGGISSSWHWAFDIWGQGTMVTVSSASTKGPSVFPLAPSSKSTSGGTAALGCLVKDYFPEPVTVSWNSGALTSGVHTFPAVLQSSGLYSLSSVVTVPSSSLGTQTYICNVNHKPSNTKVDKKVEPKSCDKTHTCPPCPAPELLGGPSVFLFPPKPKDTLMISRTPEVTCVVVDVSHEDPEVKFNWYVDGVEVHNAKTKPCEEQYGSTYRCVSVLTVLHQDWLNGKEYKCKVSNKALPAPIEKTISKAKGQPREPQVYTLPPSREEMTKNQVSLTCLVKGFYPSDIAVEWESNGQPENNYKTTPPVLDSDGSFFLYSKLTVDKSRWQQGNVFSCSVMHEALHNHYTQKSLSLSPGGGGGSSPGQGTQSENSCTHFPGNLPNMLRDLRDAFSRVKTFFQMKDQLDNKLLKESLLEDFKGYLGCQALSEMIQFYLEEVMPQAENQRPDIKAHVNSLGENLKTLRLRLRRCHRFLPCENGGGSGGKSKAVEQVKNAFNKLQEKGIYKAMSEFDIFINYIEAYMTMKIRN

SEQ ID NO: 2504 - protein, 166 aa, synthetic construct
  REGION 1..166: note = Synthetic
SPGQGTQSENSCTHFPGNLPNMLRDLRDAFSRVKTFFQMKDQLDNKLLKESLLEDFKGYLGCQALSEMIQFYLEEVMPQAENQRPDIKAHVNSLGENLKTLRLRLRRCHRFLPCENGGGSGGKSKAVEQVKNAFNKLQEKGIYKAMSEFDIFINYIEAYMTMKIRN

SEQ ID NO: 2505 - protein, 622 aa, synthetic construct
  REGION 1..622: note = Synthetic
QVQLVQSGAEVTKPGASVKVSCKASGYTFTRYDINWVRQATGQGLEWMGWMNPNSGNSGSVQKFRGRVTMTRDTSITTVYMELSSLRSDDTAVYYCARGGISSSWHWAFDIWGQGTMVTVSSASTKGPSVFPLAPSSKSTSGGTAALGCLVKDYFPEPVTVSWNSGALTSGVHTFPAVLQSSGLYSLSSVVTVPSSSLGTQTYICNVNHKPSNTKVDKKVEPKSCDKTHTCPPCPAPELLGGPSVFLFPPKPKDTLMISRTPEVTCVVVDVSHEDPEVKFNWYVDGVEVHNAKTKPCEEQYGSTYRCVSVLTVLHQDWLNGKEYKCKVSNKALPAPIEKTISKAKGQPREPQVYTLPPSREEMTKNQVSLTCLVKGFYPSDIAVEWESNGQPENNYKTTPPVLDSDGSFFLYSKLTVDKSRWQQGNVFSCSVMHEALHNHYTQKSLSLSPGGGGGSSPGQGTQSENSCTHFPGNLPNMLRDLRDAFSRVKTFFQMKDQLDNKLLKESLLEDFKGYLGCQALSCMIQFYLEEVMPQAENQDPDIKAHVNSLGENLKTLRLRLRRCHRFLPCENGGGSGGKSKACEQVKNAFNKLQEKGIYKAMSEFDIFINYIEAYMTMKIRN

SEQ ID NO: 2506 - protein, 166 aa, synthetic construct
  REGION 1..166: note = Synthetic
SPGQGTQSENSCTHFPGNLPNMLRDLRDAFSRVKTFFQMKDQLDNKLLKESLLEDFKGYLGCQALSCMIQFYLEEVMPQAENQDPDIKAHVNSLGENLKTLRLRLRRCHRFLPCENGGGSGGKSKACEQVKNAFNKLQEKGIYKAMSEFDIFINYIEAYMTMKIRN

SEQ ID NO: 2507 - protein, 622 aa, synthetic construct
  REGION 1..622: note = Synthetic
QVQLVQSGAEVTKPGASVKVSCKASGYTFTRYDINWVRQATGQGLEWMGWMNPNSGNSGSVQKFRGRVTMTRDTSITTVYMELSSLRSDDTAVYYCARGGISSSWHWAFDIWGQGTMVTVSSASTKGPSVFPLAPSSKSTSGGTAALGCLVKDYFPEPVTVSWNSGALTSGVHTFPAVLQSSGLYSLSSVVTVPSSSLGTQTYICNVNHKPSNTKVDKKVEPKSCDKTHTCPPCPAPELLGGPSVFLFPPKPKDTLMISRTPEVTCVVVDVSHEDPEVKFNWYVDGVEVHNAKTKPCEEQYGSTYRCVSVLTVLHQDWLNGKEYKCKVSNKALPAPIEKTISKAKGQPREPQVYTLPPSREEMTKNQVSLTCLVKGFYPSDIAVEWESNGQPENNYKTTPPVLDSDGSFFLYSKLTVDKSRWQQGNVFSCSVMHEALHNHYTQKSLSLSPGGGGGSSPGQGTQSENSCTHFPGNLPNMLRDLRDAFSRVKTFFQMKDQLDNKLLKESLLEDFKGYLGCQALSEMIQFYLEEVMPQAENQDPDIKAEVNSLGENLKTLRLRLRRCHRFLPCENGGGSGGKSKAVEQVKNAFNKLQEKGIYKAMSEFDIFINYIEAYMTMKIRN

SEQ ID NO: 2508 - protein, 166 aa, synthetic construct
  REGION 1..166: note = Synthetic
SPGQGTQSENSCTHFPGNLPNMLRDLRDAFSRVKTFFQMKDQLDNKLLKESLLEDFKGYLGCQALSEMIQFYLEEVMPQAENQDPDIKAEVNSLGENLKTLRLRLRRCHRFLPCENGGGSGGKSKAVEQVKNAFNKLQEKGIYKAMSEFDIFINYIEAYMTMKIRN

SEQ ID NO: 2509 - protein, 622 aa, synthetic construct
  REGION 1..622: note = Synthetic
QVQLVQSGAEVTKPGASVKVSCKASGYTFTRYDINWVRQATGQGLEWMGWMNPNSGNSGSVQKFRGRVTMTRDTSITTVYMELSSLRSDDTAVYYCARGGISSSWHWAFDIWGQGTMVTVSSASTKGPSVFPLAPSSKSTSGGTAALGCLVKDYFPEPVTVSWNSGALTSGVHTFPAVLQSSGLYSLSSVVTVPSSSLGTQTYICNVNHKPSNTKVDKKVEPKSCDKTHTCPPCPAPELLGGPSVFLFPPKPKDTLMISRTPEVTCVVVDVSHEDPEVKFNWYVDGVEVHNAKTKPCEEQYGSTYRCVSVLTVLHQDWLNGKEYKCKVSNKALPAPIEKTISKAKGQPREPQVYTLPPSREEMTKNQVSLTCLVKGFYPSDIAVEWESNGQPENNYKTTPPVLDSDGSFFLYSKLTVDKSRWQQGNVFSCSVMHEALHNHYTQKSLSLSPGGGGGSSPGQGTQSENSCTHFPGNLPNMLRDLRDAFSRVKTFFQMKDQLDNKLLKESLLEDFKGYLGCQALSEMIQFYLEEVMPQAENQDPDIKAQVNSLGENLKTLRLRLRRCHRFLPCENGGGSGGKSKAVEQVKNAFNKLQEKGIYKAMSEFDIFINYIEAYMTMKIRN

SEQ ID NO: 2510 - protein, 166 aa, synthetic construct
  REGION 1..166: note = Synthetic
SPGQGTQSENSCTHFPGNLPNMLRDLRDAFSRVKTFFQMKDQLDNKLLKESLLEDFKGYLGCQALSEMIQFYLEEVMPQAENQDPDIKAQVNSLGENLKTLRLRLRRCHRFLPCENGGGSGGKSKAVEQVKNAFNKLQEKGIYKAMSEFDIFINYIEAYMTMKIRN

SEQ ID NO: 2511 - protein, 622 aa, synthetic construct
  REGION 1..622: note = Synthetic
QVQLVQSGAEVTKPGASVKVSCKASGYTFTRYDINWVRQATGQGLEWMGWMNPNSGNSGSVQKFRGRVTMTRDTSITTVYMELSSLRSDDTAVYYCARGGISSSWHWAFDIWGQGTMVTVSSASTKGPSVFPLAPSSKSTSGGTAALGCLVKDYFPEPVTVSWNSGALTSGVHTFPAVLQSSGLYSLSSVVTVPSSSLGTQTYICNVNHKPSNTKVDKKVEPKSCDKTHTCPPCPAPELLGGPSVFLFPPKPKDTLMISRTPEVTCVVVDVSHEDPEVKFNWYVDGVEVHNAKTKPCEEQYGSTYRCVSVLTVLHQDWLNGKEYKCKVSNKALPAPIEKTISKAKGQPREPQVYTLPPSREEMTKNQVSLTCLVKGFYPSDIAVEWESNGQPENNYKTTPPVLDSDGSFFLYSKLTVDKSRWQQGNVFSCSVMHEALHNHYTQKSLSLSPGGGGGSSPGQGTQSENSCTHFPGNLPNMLRDLRDAFSRVKTFFQMKDQLDNKLLSESLLEDFKGYLGCQALSEMIQFYLEEVMPQAENQDPDIKAHVNSLGENLKTLRLRLRRCHRFLPCENGGGSGGKSKAVEQVKNAFNKLQEKGIYKAMSEFDIFINYIEAYMTMKIRN

SEQ ID NO: 2512 - protein, 166 aa, synthetic construct
  REGION 1..166: note = Synthetic
SPGQGTQSENSCTHFPGNLPNMLRDLRDAFSRVKTFFQMKDQLDNKLLSESLLEDFKGYLGCQALSEMIQFYLEEVMPQAENQDPDIKAHVNSLGENLKTLRLRLRRCHRFLPCENGGGSGGKSKAVEQVKNAFNKLQEKGIYKAMSEFDIFINYIEAYMTMKIRN

SEQ ID NO: 2513 - protein, 622 aa, synthetic construct
  REGION 1..622: note = Synthetic
QVQLVQSGAEVTKPGASVKVSCKASGYTFTRYDINWVRQATGQGLEWMGWMNPNSGNSGSVQKFRGRVTMTRDTSITTVYMELSSLRSDDTAVYYCARGGISSSWHWAFDIWGQGTMVTVSSASTKGPSVFPLAPSSKSTSGGTAALGCLVKDYFPEPVTVSWNSGALTSGVHTFPAVLQSSGLYSLSSVVTVPSSSLGTQTYICNVNHKPSNTKVDKKVEPKSCDKTHTCPPCPAPELLGGPSVFLFPPKPKDTLMISRTPEVTCVVVDVSHEDPEVKFNWYVDGVEVHNAKTKPCEEQYGSTYRCVSVLTVLHQDWLNGKEYKCKVSNKALPAPIEKTISKAKGQPREPQVYTLPPSREEMTKNQVSLTCLVKGFYPSDIAVEWESNGQPENNYKTTPPVLDSDGSFFLYSKLTVDKSRWQQGNVFSCSVMHEALHNHYTQKSLSLSPGGGGGSSPGQGTQSENSCTHFPGNLPNMLRDLRDAFSRVKTFFQMKDQLDNKLLTESLLEDFKGYLGCQALSEMIQFYLEEVMPQAENQDPDIKAHVNSLGENLKTLRLRLRRCHRFLPCENGGGSGGKSKAVEQVKNAFNKLQEKGIYKAMSEFDIFINYIEAYMTMKIRN

SEQ ID NO: 2514 - protein, 166 aa, synthetic construct
  REGION 1..166: note = Synthetic
SPGQGTQSENSCTHFPGNLPNMLRDLRDAFSRVKTFFQMKDQLDNKLLTESLLEDFKGYLGCQALSEMIQFYLEEVMPQAENQDPDIKAHVNSLGENLKTLRLRLRRCHRFLPCENGGGSGGKSKAVEQVKNAFNKLQEKGIYKAMSEFDIFINYIEAYMTMKIRN

SEQ ID NO: 2515 - protein, 622 aa, synthetic construct
  REGION 1..622: note = Synthetic
QVQLVQSGAEVTKPGASVKVSCKASGYTFTRYDINWVRQATGQGLEWMGWMNPNSGNSGSVQKFRGRVTMTRDTSITTVYMELSSLRSDDTAVYYCARGGISSSWHWAFDIWGQGTMVTVSSASTKGPSVFPLAPSSKSTSGGTAALGCLVKDYFPEPVTVSWNSGALTSGVHTFPAVLQSSGLYSLSSVVTVPSSSLGTQTYICNVNHKPSNTKVDKKVEPKSCDKTHTCPPCPAPELLGGPSVFLFPPKPKDTLMISRTPEVTCVVVDVSHEDPEVKFNWYVDGVEVHNAKTKPCEEQYGSTYRCVSVLTVLHQDWLNGKEYKCKVSNKALPAPIEKTISKAKGQPREPQVYTLPPSREEMTKNQVSLTCLVKGFYPSDIAVEWESNGQPENNYKTTPPVLDSDGSFFLYSKLTVDKSRWQQGNVFSCSVMHEALHNHYTQKSLSLSPGGGGGSSPGQGTQSENSCTHFPGNLPNMLRDLRDAFSRVKTFFQMKDQLDNKLLKESLLEDFCGYLGCQALSEMIQFYLEEVMPQAENQDPDIKAHVNSLGENLKTLRLRLRRCHRFLPCENGGGSGGKSKAVEQVKNAFNKLQEKGIYKAMSEFDIFINYIEAYMTCKIRN

SEQ ID NO: 2516 - protein, 166 aa, synthetic construct
  REGION 1..166: note = Synthetic
SPGQGTQSENSCTHFPGNLPNMLRDLRDAFSRVKTFFQMKDQLDNKLLKESLLEDFCGYLGCQALSEMIQFYLEEVMPQAENQDPDIKAHVNSLGENLKTLRLRLRRCHRFLPCENGGGSGGKSKAVEQVKNAFNKLQEKGIYKAMSEFDIFINYIEAYMTCKIRN

SEQ ID NO: 2517 - protein, 622 aa, synthetic construct
  REGION 1..622: note = Synthetic
QVQLVQSGAEVTKPGASVKVSCKASGYTFTRYDINWVRQATGQGLEWMGWMNPNSGNSGSVQKFRGRVTMTRDTSITTVYMELSSLRSDDTAVYYCARGGISSSWHWAFDIWGQGTMVTVSSASTKGPSVFPLAPSSKSTSGGTAALGCLVKDYFPEPVTVSWNSGALTSGVHTFPAVLQSSGLYSLSSVVTVPSSSLGTQTYICNVNHKPSNTKVDKKVEPKSCDKTHTCPPCPAPELLGGPSVFLFPPKPKDTLMISRTPEVTCVVVDVSHEDPEVKFNWYVDGVEVHNAKTKPCEEQYGSTYRCVSVLTVLHQDWLNGKEYKCKVSNKALPAPIEKTISKAKGQPREPQVYTLPPSREEMTKNQVSLTCLVKGFYPSDIAVEWESNGQPENNYKTTPPVLDSDGSFFLYSKLTVDKSRWQQGNVFSCSVMHEALHNHYTQKSLSLSPGGGGGSSPGQGTQSENSCTHFPGNLPNMLRDLRDAFSRVKTFFQMKDQLDNKLLKESLLEDFKGYLGCQALSEMIQFYLEEVMPQAENQDPDIKAHVNSLGENLKTLRERLRRCHRFLPCENGGGSGGKSKAVEQVKNAFNKLQEKGIYKAMSEFDIFINYIEAYMTMKIRN

SEQ ID NO: 2518 - protein, 166 aa, synthetic construct
  REGION 1..166: note = Synthetic
SPGQGTQSENSCTHFPGNLPNMLRDLRDAFSRVKTFFQMKDQLDNKLLKESLLEDFKGYLGCQALSEMIQFYLEEVMPQAENQDPDIKAHVNSLGENLKTLRERLRRCHRFLPCENGGGSGGKSKAVEQVKNAFNKLQEKGIYKAMSEFDIFINYIEAYMTMKIRN

SEQ ID NO: 2519 - protein, 622 aa, synthetic construct
  REGION 1..622: note = Synthetic
QVQLVQSGAEVTKPGASVKVSCKASGYTFTRYDINWVRQATGQGLEWMGWMNPNSGNSGSVQKFRGRVTMTRDTSITTVYMELSSLRSDDTAVYYCARGGISSSWHWAFDIWGQGTMVTVSSASTKGPSVFPLAPSSKSTSGGTAALGCLVKDYFPEPVTVSWNSGALTSGVHTFPAVLQSSGLYSLSSVVTVPSSSLGTQTYICNVNHKPSNTKVDKKVEPKSCDKTHTCPPCPAPELLGGPSVFLFPPKPKDTLMISRTPEVTCVVVDVSHEDPEVKFNWYVDGVEVHNAKTKPCEEQYGSTYRCVSVLTVLHQDWLNGKEYKCKVSNKALPAPIEKTISKAKGQPREPQVYTLPPSREEMTKNQVSLTCLVKGFYPSDIAVEWESNGQPENNYKTTPPVLDSDGSFFLYSKLTVDKSRWQQGNVFSCSVMHEALHNHYTQKSLSLSPGGGGGSSPGQGTQSENSCTHFPGNLPNMLRDLRDAFSRVKTFFQMKDQLDNKLLKESLLEDFKGYLGCQALSEMIQFYLEEVRPQAENQDPDIKAHVNSLGENLKTLRLRLRRCHRFLPCENGGGSGGKSKAVEQVKNAFNKLQEKGIYKAMSEFDIFINYIEAYMTMKIRN

SEQ ID NO: 2520 - protein, 166 aa, synthetic construct
  REGION 1..166: note = Synthetic
SPGQGTQSENSCTHFPGNLPNMLRDLRDAFSRVKTFFQMKDQLDNKLLKESLLEDFKGYLGCQALSEMIQFYLEEVRPQAENQDPDIKAHVNSLGENLKTLRLRLRRCHRFLPCENGGGSGGKSKAVEQVKNAFNKLQEKGIYKAMSEFDIFINYIEAYMTMKIRN

SEQ ID NO: 2521 - protein, 622 aa, synthetic construct
  REGION 1..622: note = Synthetic
QVQLVQSGAEVTKPGASVKVSCKASGYTFTRYDINWVRQATGQGLEWMGWMNPNSGNSGSVQKFRGRVTMTRDTSITTVYMELSSLRSDDTAVYYCARGGISSSWHWAFDIWGQGTMVTVSSASTKGPSVFPLAPSSKSTSGGTAALGCLVKDYFPEPVTVSWNSGALTSGVHTFPAVLQSSGLYSLSSVVTVPSSSLGTQTYICNVNHKPSNTKVDKKVEPKSCDKTHTCPPCPAPELLGGPSVFLFPPKPKDTLMISRTPEVTCVVVDVSHEDPEVKFNWYVDGVEVHNAKTKPCEEQYGSTYRCVSVLTVLHQDWLNGKEYKCKVSNKALPAPIEKTISKAKGQPREPQVYTLPPSREEMTKNQVSLTCLVKGFYPSDIAVEWESNGQPENNYKTTPPVLDSDGSFFLYSKLTVDKSRWQQGNVFSCSVMHEALHNHYTQKSLSLSPGGGGGSSPGQGTQSENSCTHFPGNLPNMLRDLRDAFSRVKTFFQMKDQLDNKLLKESLLEDFKGYLGCQALSEMIQFYLEEVVPQAENQDPDIKAHVNSLGENLKTLRLRLRRCHRFLPCENGGGSGGKSKAVEQVKNAFNKLQEKGIYKAMSEFDIFINYIEAYMTMKIRN

SEQ ID NO: 2522 - protein, 166 aa, synthetic construct
  REGION 1..166: note = Synthetic
SPGQGTQSENSCTHFPGNLPNMLRDLRDAFSRVKTFFQMKDQLDNKLLKESLLEDFKGYLGCQALSEMIQFYLEEVVPQAENQDPDIKAHVNSLGENLKTLRLRLRRCHRFLPCENGGGSGGKSKAVEQVKNAFNKLQEKGIYKAMSEFDIFINYIEAYMTMKIRN

SEQ ID NO: 2523 - protein, 622 aa, synthetic construct
  REGION 1..622: note = Synthetic
QVQLVQSGAEVTKPGASVKVSCKASGYTFTRYDINWVRQATGQGLEWMGWMNPNSGNSGSVQKFRGRVTMTRDTSITTVYMELSSLRSDDTAVYYCARGGISSSWHWAFDIWGQGTMVTVSSASTKGPSVFPLAPSSKSTSGGTAALGCLVKDYFPEPVTVSWNSGALTSGVHTFPAVLQSSGLYSLSSVVTVPSSSLGTQTYICNVNHKPSNTKVDKKVEPKSCDKTHTCPPCPAPELLGGPSVFLFPPKPKDTLMISRTPEVTCVVVDVSHEDPEVKFNWYVDGVEVHNAKTKPCEEQYGSTYRCVSVLTVLHQDWLNGKEYKCKVSNKALPAPIEKTISKAKGQPREPQVYTLPPSREEMTKNQVSLTCLVKGFYPSDIAVEWESNGQPENNYKTTPPVLDSDGSFFLYSKLTVDKSRWQQGNVFSCSVMHEALHNHYTQKSLSLSPGGGGGSSPGQGTQSENSCTHFPGNLPNMLRDLRDAFSRVKTFFQMKDQLDNKLLKESLLEDFKGYLGCQALSEMIQFYLEEVMPCAENQDPDIKAHVNSLGENLKTLRLRLRRCHRFLPCENGGGSGGKSKAVEQVKNAFNKLQEKGCYKAMSEFDIFINYIEAYMTMKIRN

SEQ ID NO: 2524 - protein, 166 aa, synthetic construct
  REGION 1..166: note = Synthetic
SPGQGTQSENSCTHFPGNLPNMLRDLRDAFSRVKTFFQMKDQLDNKLLKESLLEDFKGYLGCQALSEMIQFYLEEVMPCAENQDPDIKAHVNSLGENLKTLRLRLRRCHRFLPCENGGGSGGKSKAVEQVKNAFNKLQEKGCYKAMSEFDIFINYIEAYMTMKIRN

SEQ ID NO: 2525 - protein, 622 aa, synthetic construct
  REGION 1..622: note = Synthetic
QVQLVQSGAEVTKPGASVKVSCKASGYTFTRYDINWVRQATGQGLEWMGWMNPNSGNSGSVQKFRGRVTMTRDTSITTVYMELSSLRSDDTAVYYCARGGISSSWHWAFDIWGQGTMVTVSSASTKGPSVFPLAPSSKSTSGGTAALGCLVKDYFPEPVTVSWNSGALTSGVHTFPAVLQSSGLYSLSSVVTVPSSSLGTQTYICNVNHKPSNTKVDKKVEPKSCDKTHTCPPCPAPELLGGPSVFLFPPKPKDTLMISRTPEVTCVVVDVSHEDPEVKFNWYVDGVEVHNAKTKPCEEQYGSTYRCVSVLTVLHQDWLNGKEYKCKVSNKALPAPIEKTISKAKGQPREPQVYTLPPSREEMTKNQVSLTCLVKGFYPSDIAVEWESNGQPENNYKTTPPVLDSDGSFFLYSKLTVDKSRWQQGNVFSCSVMHEALHNHYTQKSLSLSPGGGGGSSPGQGTQSENSCTHFPGNLPNMLRDLRDAFSRVKTFFQMKDQLDNKLLKESLLEDFKGYLGCQALSEMIQFYLEEVMPRAENQDPDIKAHVNSLGENLKTLRLRLRRCHRFLPCENGGGSGGKSKAVEQVKNAFNKLQEKGIYKAMSEFDIFINYIEAYMTMKIRN

SEQ ID NO: 2526 - protein, 166 aa, synthetic construct
  REGION 1..166: note = Synthetic
SPGQGTQSENSCTHFPGNLPNMLRDLRDAFSRVKTFFQMKDQLDNKLLKESLLEDFKGYLGCQALSEMIQFYLEEVMPRAENQDPDIKAHVNSLGENLKTLRLRLRRCHRFLPCENGGGSGGKSKAVEQVKNAFNKLQEKGIYKAMSEFDIFINYIEAYMTMKIRN

SEQ ID NO: 2527 - protein, 622 aa, synthetic construct
  REGION 1..622: note = Synthetic
QVQLVQSGAEVTKPGASVKVSCKASGYTFTRYDINWVRQATGQGLEWMGWMNPNSGNSGSVQKFRGRVTMTRDTSITTVYMELSSLRSDDTAVYYCARGGISSSWHWAFDIWGQGTMVTVSSASTKGPSVFPLAPSSKSTSGGTAALGCLVKDYFPEPVTVSWNSGALTSGVHTFPAVLQSSGLYSLSSVVTVPSSSLGTQTYICNVNHKPSNTKVDKKVEPKSCDKTHTCPPCPAPELLGGPSVFLFPPKPKDTLMISRTPEVTCVVVDVSHEDPEVKFNWYVDGVEVHNAKTKPCEEQYGSTYRCVSVLTVLHQDWLNGKEYKCKVSNKALPAPIEKTISKAKGQPREPQVYTLPPSREEMTKNQVSLTCLVKGFYPSDIAVEWESNGQPENNYKTTPPVLDSDGSFFLYSKLTVDKSRWQQGNVFSCSVMHEALHNHYTQKSLSLSPGGGGGSSPGQGTQSENSCTHFPGNLPNMLRDLRDAFSRVKTFFQMKDQLDNKLLKESLLEDFKGYLGCQALSEMIQFYLEEVMPQAENQDPDIKAHVNELGENLKTLRLRLRRCHRFLPCENGGGSGGKSKAVEQVKNAFNKLQEKGIYKAMSEFDIFINYIEAYMTMKIRN

SEQ ID NO: 2528 - protein, 166 aa, synthetic construct
  REGION 1..166: note = Synthetic
SPGQGTQSENSCTHFPGNLPNMLRDLRDAFSRVKTFFQMKDQLDNKLLKESLLEDFKGYLGCQALSEMIQFYLEEVMPQAENQDPDIKAHVNELGENLKTLRLRLRRCHRFLPCENGGGSGGKSKAVEQVKNAFNKLQEKGIYKAMSEFDIFINYIEAYMTMKIRN

SEQ ID NO: 2529 - protein, 622 aa, synthetic construct
  REGION 1..622: note = Synthetic
QVQLVQSGAEVTKPGASVKVSCKASGYTFTRYDINWVRQATGQGLEWMGWMNPNSGNSGSVQKFRGRVTMTRDTSITTVYMELSSLRSDDTAVYYCARGGISSSWHWAFDIWGQGTMVTVSSASTKGPSVFPLAPSSKSTSGGTAALGCLVKDYFPEPVTVSWNSGALTSGVHTFPAVLQSSGLYSLSSVVTVPSSSLGTQTYICNVNHKPSNTKVDKKVEPKSCDKTHTCPPCPAPELLGGPSVFLFPPKPKDTLMISRTPEVTCVVVDVSHEDPEVKFNWYVDGVEVHNAKTKPCEEQYGSTYRCVSVLTVLHQDWLNGKEYKCKVSNKALPAPIEKTISKAKGQPREPQVYTLPPSREEMTKNQVSLTCLVKGFYPSDIAVEWESNGQPENNYKTTPPVLDSDGSFFLYSKLTVDKSRWQQGNVFSCSVMHEALHNHYTQKSLSLSPGGGGGSSPGQGTQSENSCTHFPGNLPNMLRDLRDAFSRVKTFFQMKDQLDNKLLKESLLEDFKGYLGCQALSEMIQFYLEEVMPQAENQDPDIKAHVNQLGENLKTLRLRLRRCHRFLPCENGGGSGGKSKAVEQVKNAFNKLQEKGIYKAMSEFDIFINYIEAYMTMKIRN

SEQ ID NO: 2530 - protein, 166 aa, synthetic construct
  REGION 1..166: note = Synthetic
SPGQGTQSENSCTHFPGNLPNMLRDLRDAFSRVKTFFQMKDQLDNKLLKESLLEDFKGYLGCQALSEMIQFYLEEVMPQAENQDPDIKAHVNQLGENLKTLRLRLRRCHRFLPCENGGGSGGKSKAVEQVKNAFNKLQEKGIYKAMSEFDIFINYIEAYMTMKIRN

SEQ ID NO: 2531 - protein, 622 aa, synthetic construct
  REGION 1..622: note = Synthetic
QVQLVQSGAEVTKPGASVKVSCKASGYTFTRYDINWVRQATGQGLEWMGWMNPNSGNSGSVQKFRGRVTMTRDTSITTVYMELSSLRSDDTAVYYCARGGISSSWHWAFDIWGQGTMVTVSSASTKGPSVFPLAPSSKSTSGGTAALGCLVKDYFPEPVTVSWNSGALTSGVHTFPAVLQSSGLYSLSSVVTVPSSSLGTQTYICNVNHKPSNTKVDKKVEPKSCDKTHTCPPCPAPELLGGPSVFLFPPKPKDTLMISRTPEVTCVVVDVSHEDPEVKFNWYVDGVEVHNAKTKPCEEQYGSTYRCVSVLTVLHQDWLNGKEYKCKVSNKALPAPIEKTISKAKGQPREPQVYTLPPSREEMTKNQVSLTCLVKGFYPSDIAVEWESNGQPENNYKTTPPVLDSDGSFFLYSKLTVDKSRWQQGNVFSCSVMHEALHNHYTQKSLSLSPGGGGGSSPGQGTQSENSCTHFPGNLPNMLRDLRDAFSRVKTFFQMKDQLDNKLLKESLLEDFKGYLGCQALSEMIQFYLEEVMPQAENQDPDIKAHVNSLGENLKRLRLRLRRCHRFLPCENGGGSGGKSKAVEQVKNAFNKLQEKGIYKAMSEFDIFINYIEAYMTMKIRN

SEQ ID NO: 2532 - protein, 166 aa, synthetic construct
  REGION 1..166: note = Synthetic
SPGQGTQSENSCTHFPGNLPNMLRDLRDAFSRVKTFFQMKDQLDNKLLKESLLEDFKGYLGCQALSEMIQFYLEEVMPQAENQDPDIKAHVNSLGENLKRLRLRLRRCHRFLPCENGGGSGGKSKAVEQVKNAFNKLQEKGIYKAMSEFDIFINYIEAYMTMKIRN

SEQ ID NO: 2533 - protein, 622 aa, synthetic construct
  REGION 1..622: note = Synthetic
QVQLVQSGAEVTKPGASVKVSCKASGYTFTRYDINWVRQATGQGLEWMGWMNPNSGNSGSVQKFRGRVTMTRDTSITTVYMELSSLRSDDTAVYYCARGGISSSWHWAFDIWGQGTMVTVSSASTKGPSVFPLAPSSKSTSGGTAALGCLVKDYFPEPVTVSWNSGALTSGVHTFPAVLQSSGLYSLSSVVTVPSSSLGTQTYICNVNHKPSNTKVDKKVEPKSCDKTHTCPPCPAPELLGGPSVFLFPPKPKDTLMISRTPEVTCVVVDVSHEDPEVKFNWYVDGVEVHNAKTKPCEEQYGSTYRCVSVLTVLHQDWLNGKEYKCKVSNKALPAPIEKTISKAKGQPREPQVYTLPPSREEMTKNQVSLTCLVKGFYPSDIAVEWESNGQPENNYKTTPPVLDSDGSFFLYSKLTVDKSRWQQGNVFSCSVMHEALHNHYTQKSLSLSPGGGGGSSPGQGTQSENSCTHFPGNLPNMLRDLRDAFSRVKTFFQMKDQLDNKLLKESLLEDFKGTLGCQALSEMIQFYLEEVMPQAENQDPDIKAHVNSLGENLKTLRLRLRRCHRFLPCENGGGSGGKSKAVEQVKNAFNKLQEKGIYKAMSEFDIFINYIEAYMTMKIRN

SEQ ID NO: 2534 - protein, 166 aa, synthetic construct
  REGION 1..166: note = Synthetic
SPGQGTQSENSCTHFPGNLPNMLRDLRDAFSRVKTFFQMKDQLDNKLLKESLLEDFKGTLGCQALSEMIQFYLEEVMPQAENQDPDIKAHVNSLGENLKTLRLRLRRCHRFLPCENGGGSGGKSKAVEQVKNAFNKLQEKGIYKAMSEFDIFINYIEAYMTMKIRN

SEQ ID NO: 2535 - protein, 622 aa, synthetic construct
  REGION 1..622: note = Synthetic
QVQLVQSGAEVTKPGASVKVSCKASGYTFTRYDINWVRQATGQGLEWMGWMNPNSGNSGSVQKFRGRVTMTRDTSITTVYMELSSLRSDDTAVYYCARGGISSSWHWAFDIWGQGTMVTVSSASTKGPSVFPLAPSSKSTSGGTAALGCLVKDYFPEPVTVSWNSGALTSGVHTFPAVLQSSGLYSLSSVVTVPSSSLGTQTYICNVNHKPSNTKVDKKVEPKSCDKTHTCPPCPAPELLGGPSVFLFPPKPKDTLMISRTPEVTCVVVDVSHEDPEVKFNWYVDGVEVHNAKTKPCEEQYGSTYRCVSVLTVLHQDWLNGKEYKCKVSNKALPAPIEKTISKAKGQPREPQVYTLPPSREEMTKNQVSLTCLVKGFYPSDIAVEWESNGQPENNYKTTPPVLDSDGSFFLYSKLTVDKSRWQQGNVFSCSVMHEALHNHYTQKSLSLSPGGGGGSSPGQGTQSENSCTHFPGNLPNMLRDLRDAFSRVKTFFQMKDQLDNKLLKESLLEDFKGYLGCQALSEMIQFYLEEVMPQAENQDPDIKAHVNSLGENLKTLRLRLRRCHRFLPCENGGGSGGKSKAVEQVKNMFNKLQEKGIYKAMSEFDIFINYIEAYMTMKIRN

SEQ ID NO: 2536 - protein, 166 aa, synthetic construct
  REGION 1..166: note = Synthetic
SPGQGTQSENSCTHFPGNLPNMLRDLRDAFSRVKTFFQMKDQLDNKLLKESLLEDFKGYLGCQALSEMIQFYLEEVMPQAENQDPDIKAHVNSLGENLKTLRLRLRRCHRFLPCENGGGSGGKSKAVEQVKNMFNKLQEKGIYKAMSEFDIFINYIEAYMTMKIRN

SEQ ID NO: 2537 - protein, 622 aa, synthetic construct; identical to SEQ ID NO: 2475
  REGION 1..622: note = Synthetic

SEQ ID NO: 2538 - skipped

SEQ ID NO: 2539 - protein, 622 aa, synthetic construct
  REGION 1..622: note = Synthetic
QVQLVQSGAEVTKPGASVKVSCKASGYTFTRYDINWVRQATGQGLEWMGWMNPNSGNSGSVQKFRGRVTMTRDTSITTVYMELSSLRSDDTAVYYCARGGISSSWHWAFDIWGQGTMVTVSSASTKGPSVFPLAPSSKSTSGGTAALGCLVKDYFPEPVTVSWNSGALTSGVHTFPAVLQSSGLYSLSSVVTVPSSSLGTQTYICNVNHKPSNTKVDKKVEPKSCDKTHTCPPCPAPELLGGPSVFLFPPKPKDTLMISRTPEVTCVVVDVSHEDPEVKFNWYVDGVEVHNAKTKPCEEQYGSTYRCVSVLTVLHQDWLNGKEYKCKVSNKALPAPIEKTISKAKGQPREPQVYTLPPSREEMTKNQVSLTCLVKGFYPSDIAVEWESNGQPENNYKTTPPVLDSDGSFFLYSKLTVDKSRWQQGNVFSCSVMHEALHNHYTQKSLSLSPGGGGGSSPGQGTQSENSCTHFPGNLPNMLRDLRDAFSRVKTFFCMKDQLDNKLLKESLLEDFKGYLGCQALSEMIQFYLEEVMPQAENQDPDIKAHVNSLGENLKTLRLRLRRCHRFLPCENGGGSGGKSKAVEQVKNAFNKLQEKGIYKAMCEFDIFINYIEAYMTMKIRN

SEQ ID NO: 2540 - protein, 166 aa, synthetic construct
  REGION 1..166: note = Synthetic
SPGQGTQSENSCTHFPGNLPNMLRDLRDAFSRVKTFFCMKDQLDNKLLKESLLEDFKGYLGCQALSEMIQFYLEEVMPQAENQDPDIKAHVNSLGENLKTLRLRLRRCHRFLPCENGGGSGGKSKAVEQVKNAFNKLQEKGIYKAMCEFDIFINYIEAYMTMKIRN

SEQ ID NO: 2541 - protein, 451 aa, synthetic construct
  REGION 1..451: note = Synthetic
QVQLVQSGAEVTKPGASVKVSCKASGYTFTRYDINWVRQATGQGLEWMGWMNPNSGNSGSVQKFRGRVTMTRDTSITTVYMELSSLRSDDTAVYYCARGGISSSWHWAFDIWGQGTMVTVSSASTKGPSVFPLAPSSKSTSGGTAALGCLVKDYFPEPVTVSWNSGALTSGVHTFPAVLQSSGLYSLSSVVTVPSSSLGTQTYICNVNHKPSNTKVDKKVEPKSCDKTHTCPPCPAPELLGGPSVFLFPPKPKDTLMISRTPEVTCVVVDVSHEDPEVKFNWYVDGVEVHNAKTKPCEEQYGSTYRCVSVLTVLHQDWLNGKEYKCKVSNKALPAPIEKTISKAKGQPREPQVYTLPPSREEMTKNQVSLTCLVKGFYPSDIAVEWESNGQPENNYDTTPPVLDSDGSFFLYSDLTVDKSRWQQGNVFSCSVMHEALHNHYTQDSLSLSPG

SEQ ID NO: 2542 - protein, 214 aa, synthetic construct; identical to SEQ ID NO: 2010
  REGION 1..214: note = Synthetic

SEQ ID NO: 2543 - protein, 215 aa, synthetic construct; identical to SEQ ID NO: 2253
  REGION 1..215: note = Synthetic

SEQ ID NO: 2544 - protein, 214 aa, synthetic construct
  REGION 1..214: note = Synthetic
DIQMTQSPSSLSASVGDRVTITCQASQDIRKHLNWYQQKPGKAPNLLIYDAANLETGVPSRFSGSGSGTAFTFTISSLQPEDIATYYCQHYANLPITFGQGTRLEIKRTVAAPSVFIFPPSDEQLKSGTASVVCLLNNFYPREAKVQWKVDNALQSGNSQESVTEQDSKDSTYSLSSTLTLSKADYEKHKVYACEVTHQGLSSPVTKSFNRGEC

SEQ ID NO: 2545 - protein, 211 aa, synthetic construct
  REGION 1..211: note = Synthetic
SYELTQPPSVSVSPGQTASITCSGDKLGERNVSWYQLKPGQSPILVIYQDNKRPSGIPERFSGSKSGNTAILTISGTQAMDEADYYCQAWDRNVVFGGGTKLTVLGQPKAAPSVTLFPPSSEELQANKATLVCLISDFYPGAVTVAWKADSSPVKAGVETTTPSKQSNNKYAASSYLSLTPEQWKSHRSYSCQVTHEGSTVEKTVAPTECS

SEQ ID NO: 2546 - protein, 215 aa, synthetic construct
  REGION 1..215: note = Synthetic
EIVMTQSPAILSVSPGERATLSCRASQSVSSNLAWYQQKPGQAPRLLIYGASTRATGVPARFSGGGSGTDFTLTISSLQSEDFAVYYCQHFKTWPPLTFGGGTKVEIKRTVAAPSVFIFPPSDEQLKSGTASVVCLLNNFYPREAKVQWKVDNALQSGNSQESVTEQDSKDSTYSLSSTLTLSKADYEKHKVYACEVTHQGLSSPVTKSFNRGEC

SEQ ID NO: 2547 - protein, 215 aa, synthetic construct
  REGION 1..215: note = Synthetic
EIVMTQSPATLSVSPGERATLSCRASQSVNSNLAWYQQKPGRAPRLLIYGASTRATGIPARFSGSGSGTEFTLTISSLQSEDFAVYYCQQFYNWPPWTFGQGTKVEIKRTVAAPSVFIFPPSDEQLKSGTASVVCLLNNFYPREAKVQWKVDNALQSGNSQESVTEQDSKDSTYSLSSTLTLSKADYEKHKVYACEVTHQGLSSPVTKSFNRGEC

SEQ ID NO: 2548 - protein, 214 aa, synthetic construct; identical to SEQ ID NO: 2357
  REGION 1..214: note = Synthetic

SEQ ID NO: 2549 - protein, 214 aa, synthetic construct
  REGION 1..214: note = Synthetic
DIQMTQSPSSVSASVGDRVTITCRASQGIRKWLAWYQQKPGRAPKLLIYAASRLQSGVPSRFSGSGSGTDFTLTISSLRPEDFATYYCLQAHGFPWTFGQGTKVEIKRTVAAPSVFIFPPSDEQLKSGTASVVCLLNNFYPREAKVQWKVDNALQSGNSQESVTEQDSKDSTYSLSSTLTLSKADYEKHKVYACEVTHQGLSSPVTKSFNRGEC

SEQ ID NO: 2550 - protein, 214 aa, synthetic construct
  REGION 1..214: note = Synthetic
DIQMTQSPSSLSASVGDRVTITCQASQDINNHLNWYQQKPGKAPKLLIYDVSNLETGVPSSFSGSGSGTDFTFTISSLQPEDIATYFCQQYDKLPLTFGGGTKVEIKRTVAAPSVFIFPPSDEQLKSGTASVVCLLNNFYPREAKVQWKVDNALQSGNSQESVTEQDSKDSTYSLSSTLTLSKADYEKHKVYACEVTHQGLSSPVTKSFNRGEC

SEQ ID NO: 2551 - protein, 214 aa, synthetic construct
  REGION 1..214: note = Synthetic
DIQMTQSPSSLSASVGDRVTITCRASQSISSNLNWYQQKPGKAPKLLISAASNLQSGVPSRFSGSESGTDFTLTISSLQSEDFATYYCQQSDSLPLTFGGGTKVEIKRTVAAPSVFIFPPSDEQLKSGTASVVCLLNNFYPREAKVQWKVDNALQSGNSQESVTEQDSKDSTYSLSSTLTLSKADYEKHKVYACEVTHQGLSSPVTKSFNRGEC

SEQ ID NO: 2552 - protein, 214 aa, synthetic construct; identical to SEQ ID NO: 2010
  REGION 1..214: note = Synthetic

SEQ ID NO: 2553 - protein, 214 aa, synthetic construct
  REGION 1..214: note = Synthetic
DIQMTQSPSSLSASVGDRVTITCQASRDISKYLNWYQQKPGKAPKLQIYDASNLETGVPSRFSGSGSGTDFTFTISSLQPEDIATYYCQHYDNIPITFGQGTRLEIKRTVAAPSVFIFPPSDEQLKSGTASVVCLLNNFYPREAKVQWKVDNALQSGNSQESVTEQDSKDSTYSLSSTLTLSKADYEKHKVYACEVTHQGLSSPVTKSFNRGEC

SEQ ID NO: 2554 - protein, 214 aa, synthetic construct
  REGION 1..214: note = Synthetic
DIQMTQSPSSLSASVGDRVTITCQASQDISKHLNWYQQKPGKAPKLLIYDTSNLETGVPSRFSGSGSGTDFTFTISSLQPEDIATYNCQQYDKLPLTFGGGTKVEIKRTVAAPSVFIFPPSDEQLKSGTASVVCLLNNFYPREAKVQWKVDNALQSGNSQESVTEQDSKDSTYSLSSTLTLSKADYEKHKVYACEVTHQGLSSPVTKSFNRGEC

SEQ ID NO: 2555 - protein, 214 aa, synthetic construct
  REGION 1..214: note = Synthetic
DTQMTQSPSSLSASEGDRVTITCQASQDIFNDLNWYQEKPGKAPKLLIYHASNLETGVPSRFSGSGSGTDYTFTISSLQPEDIATYYCQQYGNLPLTFGGGTKVEIKRTVAAPSVFIFPPSDEQLKSGTASVVCLLNNFYPREAKVQWKVDNALQSGNSQESVTEQDSKDSTYSLSSTLTLSKADYEKHKVYACEVTHQGLSSPVTKSFNRGEC

SEQ ID NO: 2556 - protein, 214 aa, synthetic construct
  REGION 1..214: note = Synthetic
DIQMTQFPSSVSASVGDRVTITCRASQGISRWLAWYQQKQGKAPKLLIYMVSSLQSGVPSRFSGSGSGTDFTLTISSLQPEDFATYYCQQSHNFPITFGQGTRLDIKRTVAAPSVFIFPPSDEQLKSGTASVVCLLNNFYPREAKVQWKVDNALQSGNSQESVTEQDSKDSTYSLSSTLTLSKADYEKHKVYACEVTHQGLSSPVTKSFNRGEC

SEQ ID NO: 2557 - protein, 214 aa, synthetic construct; identical to SEQ ID NO: 2544
  REGION 1..214: note = Synthetic

SEQ ID NO: 2558 - protein, 215 aa, synthetic construct; identical to SEQ ID NO: 2546
  REGION 1..215: note = Synthetic

SEQ ID NO: 2559 - protein, 214 aa, synthetic construct; identical to SEQ ID NO: 2549
  REGION 1..214: note = Synthetic

SEQ ID NO: 2560 - protein, 214 aa, synthetic construct; identical to SEQ ID NO: 2550
  REGION 1..214: note = Synthetic

SEQ ID NO: 2561 - protein, 214 aa, synthetic construct; identical to SEQ ID NO: 2553
  REGION 1..214: note = Synthetic

SEQ ID NO: 2562 - protein, 214 aa, synthetic construct; identical to SEQ ID NO: 2555
  REGION 1..214: note = Synthetic

SEQ ID NO: 2563 - protein, 214 aa, synthetic construct; identical to SEQ ID NO: 2556
  REGION 1..214: note = Synthetic

SEQ ID NO: 2564 - protein, 214 aa, synthetic construct
  REGION 1..214: note = Synthetic
DIQMTQSPSSLSASVGDRVTITCQASQDINNHLNWYQQKPGKAPKLLIYDVSNLETGVPSRFSGSGSGTDFTFTISSLQPEDIATYYCQQYDKLPLTFGGGTKVEIKRTVAAPSVFIFPPSDEQLKSGTASVVCLLNNFYPREAKVQWKVDNALQSGNSQESVTEQDSKDSTYSLSSTLTLSKADYEKHKVYACEVTHQGLSSPVTKSFNRGEC

SEQ ID NO: 2565 - protein, 214 aa, synthetic construct; identical to SEQ ID NO: 2564
  REGION 1..214: note = Synthetic

SEQ ID NO: 2566 - protein, 214 aa, synthetic construct
  REGION 1..214: note = Synthetic
DIQMTQSPSSVSASVGDRVTITCRASQGISRWLAWYQQKQGKAPKLLIYMVSSLQSGVPSRFSGSGSGTDFTLTISSLQPEDFATYYCQQSHNFPITFGQGTRLDIKRTVAAPSVFIFPPSDEQLKSGTASVVCLLNNFYPREAKVQWKVDNALQSGNSQESVTEQDSKDSTYSLSSTLTLSKADYEKHKVYACEVTHQGLSSPVTKSFNRGEC

SEQ ID NO: 2567 - protein, 214 aa, synthetic construct; identical to SEQ ID NO: 2566
  REGION 1..214: note = Synthetic

SEQ ID NO: 2568 - protein, 214 aa, synthetic construct; identical to SEQ ID NO: 2566
  REGION 1..214: note = Synthetic

SEQ ID NO: 2569 - protein, 214 aa, synthetic construct
  REGION 1..214: note = Synthetic
DIQMTQSPSSVSASVGDRVTITCRASQGISRWLAWYQQKPGKAPKLLIYMVSSLQSGVPSRFSGSGSGTDFTLTISSLQPEDFATYYCQQSHNFPITFGQGTRLDIKRTVAAPSVFIFPPSDEQLKSGTASVVCLLNNFYPREAKVQWKVDNALQSGNSQESVTEQDSKDSTYSLSSTLTLSKADYEKHKVYACEVTHQGLSSPVTKSFNRGEC

SEQ ID NO: 2570 - protein, 214 aa, synthetic construct; identical to SEQ ID NO: 2566
  REGION 1..214: note = Synthetic

SEQ ID NO: 2571 - protein, 214 aa, synthetic construct
  REGION 1..214: note = Synthetic
DTQMTQSPSSLSASVGDRVTITCQASQDIFNDLNWYQEKPGKAPKLLIYHASNLETGVPSRFSGSGSGTDFTFTISSLQPEDIATYYCQQYGNLPLTFGGGTKVEIKRTVAAPSVFIFPPSDEQLKSGTASVVCLLNNFYPREAKVQWKVDNALQSGNSQESVTEQDSKDSTYSLSSTLTLSKADYEKHKVYACEVTHQGLSSPVTKSFNRGEC

SEQ ID NO: 2572 - protein, 214 aa, synthetic construct
  REGION 1..214: note = Synthetic
DTQMTQSPSSLSASVGDRVTITCQASQDIFNDLNWYQQKPGKAPKLLIYHASNLETGVPSRFSGSGSGTDYTFTISSLQPEDIATYYCQQYGNLPLTFGGGTKVEIKRTVAAPSVFIFPPSDEQLKSGTASVVCLLNNFYPREAKVQWKVDNALQSGNSQESVTEQDSKDSTYSLSSTLTLSKADYEKHKVYACEVTHQGLSSPVTKSFNRGEC

SEQ ID NO: 2573 - protein, 214 aa, synthetic construct
  REGION 1..214: note = Synthetic
DTQMTQSPSSLSASVGDRVTITCQASQDIFNDLNWYQEKPGKAPKLLIYHASNLETGVPSRFSGSGSGTDYTFTISSLQPEDIATYYCQQYGNLPLTFGGGTKVEIKRTVAAPSVFIFPPSDEQLKSGTASVVCLLNNFYPREAKVQWKVDNALQSGNSQESVTEQDSKDSTYSLSSTLTLSKADYEKHKVYACEVTHQGLSSPVTKSFNRGEC

SEQ ID NO: 2574 - protein, 214 aa, synthetic construct
  REGION 1..214: note = Synthetic
DIQMTQSPSSLSASVGDRVTITCQASRDISKYLNWYQQKPGKAPKLLIYDASNLETGVPSRFSGSGSGTDFTFTISSLQPEDFATYYCQHYDNIPITFGQGTRLEIKRTVAAPSVFIFPPSDEQLKSGTASVVCLLNNFYPREAKVQWKVDNALQSGNSQESVTEQDSKDSTYSLSSTLTLSKADYEKHKVYACEVTHQGLSSPVTKSFNRGEC

SEQ ID NO: 2575 - protein, 214 aa, synthetic construct
  REGION 1..214: note = Synthetic
DIQMTQSPSSLSASVGDRVTITCQASRDISKYLNWYQQKPGKAPKLLIYDASNLETGVPSRFSGSGSGTDFTFTISSLQPEDIATYYCQHYDNIPITFGQGTRLEIKRTVAAPSVFIFPPSDEQLKSGTASVVCLLNNFYPREAKVQWKVDNALQSGNSQESVTEQDSKDSTYSLSSTLTLSKADYEKHKVYACEVTHQGLSSPVTKSFNRGEC

SEQ ID NO: 2576 - protein, 214 aa, synthetic construct; identical to SEQ ID NO: 2574
  REGION 1..214: note = Synthetic

SEQ ID NO: 2577 - protein, 214 aa, synthetic construct; identical to SEQ ID NO: 2575
  REGION 1..214: note = Synthetic

SEQ ID NO: 2578 - protein, 214 aa, synthetic construct; identical to SEQ ID NO: 2574
  REGION 1..214: note = Synthetic

SEQ ID NO: 2579 - protein, 214 aa, synthetic construct; identical to SEQ ID NO: 2574
  REGION 1..214: note = Synthetic

SEQ ID NO: 2580 - protein, 214 aa, synthetic construct; identical to SEQ ID NO: 2574
  REGION 1..214: note = Synthetic

SEQ ID NO: 2581 - protein, 214 aa, synthetic construct; identical to SEQ ID NO: 2575
  REGION 1..214: note = Synthetic

SEQ ID NO: 2582 - protein, 214 aa, synthetic construct; identical to SEQ ID NO: 2549
  REGION 1..214: note = Synthetic

SEQ ID NO: 2583 - protein, 214 aa, synthetic construct; identical to SEQ ID NO: 2549
  REGION 1..214: note = Synthetic

SEQ ID NO: 2584 - protein, 214 aa, synthetic construct; identical to SEQ ID NO: 2549
  REGION 1..214: note = Synthetic

SEQ ID NO: 2585 - protein, 214 aa, synthetic construct
  REGION 1..214: note = Synthetic
DIQMTQSPSSLSASVGDRVTITCQASQDIRKHLNWYQQKPGKAPKLLIYDAANLETGVPSRFSGSGSGTDFTFTISSLQPEDFATYYCQHYANLPITFGQGTRLEIKRTVAAPSVFIFPPSDEQLKSGTASVVCLLNNFYPREAKVQWKVDNALQSGNSQESVTEQDSKDSTYSLSSTLTLSKADYEKHKVYACEVTHQGLSSPVTKSFNRGEC

SEQ ID NO: 2586 - protein, 214 aa, synthetic construct; identical to SEQ ID NO: 2544
  REGION 1..214: note = Synthetic

SEQ ID NO: 2587 - protein, 214 aa, synthetic construct; identical to SEQ ID NO: 2585
  REGION 1..214: note = Synthetic

SEQ ID NO: 2588 - protein, 214 aa, synthetic construct; identical to SEQ ID NO: 2544
  REGION 1..214: note = Synthetic

SEQ ID NO: 2589 - protein, 214 aa, synthetic construct; identical to SEQ ID NO: 2585
  REGION 1..214: note = Synthetic

SEQ ID NO: 2590 - protein, 214 aa, synthetic construct; identical to SEQ ID NO: 2585
  REGION 1..214: note = Synthetic

SEQ ID NO: 2591 - protein, 214 aa, synthetic construct; identical to SEQ ID NO: 2585
  REGION 1..214: note = Synthetic

SEQ ID NO: 2592 - protein, 214 aa, synthetic construct
  REGION 1..214: note = Synthetic
DIQMTQSPSSLSASVGDRVTITCQASQDIRKHLNWYQQKPGKAPKLLIYDAANLETGVPSRFSGSGSGTDFTLTISSLQPEDFATYYCQHYANLPITFGQGTRLEIKRTVAAPSVFIFPPSDEQLKSGTASVVCLLNNFYPREAKVQWKVDNALQSGNSQESVTEQDSKDSTYSLSSTLTLSKADYEKHKVYACEVTHQGLSSPVTKSFNRGEC

SEQ ID NO: 2593 - protein, 214 aa, synthetic construct; identical to SEQ ID NO: 2544
  REGION 1..214: note = Synthetic

SEQ ID NO: 2594 - protein, 214 aa, synthetic construct; identical to SEQ ID NO: 2544
  REGION 1..214: note = Synthetic

SEQ ID NO: 2595 - protein, 214 aa, synthetic construct; identical to SEQ ID NO: 2585
  REGION 1..214: note = Synthetic

SEQ ID NO: 2596 - protein, 211 aa, synthetic construct
  REGION 1..211: note = Synthetic
SYELTQPPSVSVSPGQTASITCSGDKLGERQVSWYQQKPGQSPVLVIYQDNKRPSGIPERFSGSKSGNTATLTISGTQAMDEADYYCQAWDRNVVFGGGTKLTVLGQPKAAPSVTLFPPSSEELQANKATLVCLISDFYPGAVTVAWKADSSPVKAGVETTTPSKQSNNKYAASSYLSLTPEQWKSHRSYSCQVTHEGSTVEKTVAPTECS

SEQ ID NO: 2597 - protein, 211 aa, synthetic construct
  REGION 1..211: note = Synthetic
SYELTQPPSVSVSPGQTASITCSGDKLGERQVSWYQLKPGQSPVLVIYQDNKRPSGIPERFSGSKSGNTATLTISGTQAMDEADYYCQAWDRNVVFGGGTKLTVLGQPKAAPSVTLFPPSSEELQANKATLVCLISDFYPGAVTVAWKADSSPVKAGVETTTPSKQSNNKYAASSYLSLTPEQWKSHRSYSCQVTHEGSTVEKTVAPTECS

SEQ ID NO: 2598 - protein, 211 aa, synthetic construct
  REGION 1..211: note = Synthetic
SYELTQPPSVSVSPGQTASITCSGDKLGERNVGWYQQKPGQSPVLVIYQDNKRPSGIPERFSGSKSGNTATLTISGTQAMDEADYYCQAWDRNVVFGGGTKLTVLGQPKAAPSVTLFPPSSEELQANKATLVCLISDFYPGAVTVAWKADSSPVKAGVETTTPSKQSNNKYAASSYLSLTPEQWKSHRSYSCQVTHEGSTVEKTVAPTECS

SEQ ID NO: 2599 - protein, 211 aa, synthetic construct
  REGION 1..211: note = Synthetic
SYELTQPPSVSVSPGQTASITCSGDKLGERNVAWYQQKPGQSPVLVIYQDNKRPSGIPERFSGSKSGNTATLTISGTQAMDEADYYCQAWDRNVVFGGGTKLTVLGQPKAAPSVTLFPPSSEELQANKATLVCLISDFYPGAVTVAWKADSSPVKAGVETTTPSKQSNNKYAASSYLSLTPEQWKSHRSYSCQVTHEGSTVEKTVAPTECS

SEQ ID NO: 2600 - protein, 211 aa, synthetic construct; identical to SEQ ID NO: 2597
  REGION 1..211: note = Synthetic

SEQ ID NO: 2601 - protein, 215 aa, synthetic construct
  REGION 1..215: note = Synthetic
EIVMTQSPATLSVSPGERATLSCRASQSVSSNLAWYQQKPGQAPRLLIYGASTRATGIPARFSGSGSGTDFTLTISSLQPEDFAVYYCQHFKTWPPLTFGGGTKVEIKRTVAAPSVFIFPPSDEQLKSGTASVVCLLNNFYPREAKVQWKVDNALQSGNSQESVTEQDSKDSTYSLSSTLTLSKADYEKHKVYACEVTHQGLSSPVTKSFNRGEC

SEQ ID NO: 2602 - protein, 215 aa, synthetic construct
  REGION 1..215: note = Synthetic
EIVMTQSPATLSVSPGERATLSCRASQSVSSNLAWYQQKPGQAPRLLIYGASTRATGIPARFSGSGSGTDFTLTISSLQSEDFAVYYCQHFKTYPPLTFGGGTKVEIKRTVAAPSVFIFPPSDEQLKSGTASVVCLLNNFYPREAKVQWKVDNALQSGNSQESVTEQDSKDSTYSLSSTLTLSKADYEKHKVYACEVTHQGLSSPVTKSFNRGEC

SEQ ID NO: 2603 - protein, 215 aa, synthetic construct
  REGION 1..215: note = Synthetic
EIVMTQSPATLSVSPGERATLSCRASQSVSSNLAWYQQKPGQAPRLLIYGASTRATGIPARFSGSGSGTDFTLTISSLQSEDFAVYYCQHFKTFPPLTFGGGTKVEIKRTVAAPSVFIFPPSDEQLKSGTASVVCLLNNFYPREAKVQWKVDNALQSGNSQESVTEQDSKDSTYSLSSTLTLSKADYEKHKVYACEVTHQGLSSPVTKSFNRGEC

SEQ ID NO: 2604 - protein, 215 aa, synthetic construct
  REGION 1..215: note = Synthetic
EIVMTQSPATLSVSPGERATLSCRASQSVSSNLAWYQQKPGQAPRLLIYGASTRATGIPARFSGSGSGTDFTLTISSLQSEDFAVYYCQHFKTHPPLTFGGGTKVEIKRTVAAPSVFIFPPSDEQLKSGTASVVCLLNNFYPREAKVQWKVDNALQSGNSQESVTEQDSKDSTYSLSSTLTLSKADYEKHKVYACEVTHQGLSSPVTKSFNRGEC

SEQ ID NO: 2605 - protein, 215 aa, synthetic construct
  REGION 1..215: note = Synthetic
EIVMTQSPATLSVSPGERATLSCRASQSVSSNLAWYQQKPGQAPRLLIYGASTRATGIPARFSGSGSGTDFTLTISSLQPEDFAVYYCQHFKTYPPLTFGGGTKVEIKRTVAAPSVFIFPPSDEQLKSGTASVVCLLNNFYPREAKVQWKVDNALQSGNSQESVTEQDSKDSTYSLSSTLTLSKADYEKHKVYACEVTHQGLSSPVTKSFNRGEC

SEQ ID NO: 2606 - DNA, 714 bp, synthetic construct; identical to SEQ ID NO: 304
  misc_feature 1..714: note = Synthetic
  source 1..714: mol_type = other DNA

SEQ ID NO: 2607 - DNA, 711 bp, synthetic construct; identical to SEQ ID NO: 512
  misc_feature 1..711: note = Synthetic
  source 1..711: mol_type = other DNA

SEQ ID NO: 2608 - DNA, 693 bp, synthetic construct; identical to SEQ ID NO: 464
  misc_feature 1..693: note = Synthetic
  source 1..693: mol_type = other DNA

SEQ ID NO: 2609 - DNA, 714 bp, synthetic construct; identical to SEQ ID NO: 320
  misc_feature 1..714: note = Synthetic
  source 1..714: mol_type = other DNA

SEQ ID NO: 2610 - DNA, 714 bp, synthetic construct; identical to SEQ ID NO: 336
  misc_feature 1..714: note = Synthetic
  source 1..714: mol_type = other DNA

SEQ ID NO: 2611 - DNA, 711 bp, synthetic construct; identical to SEQ ID NO: 352
  misc_feature 1..711: note = Synthetic
  source 1..711: mol_type = other DNA

SEQ ID NO: 2612 - DNA, 711 bp, synthetic construct; identical to SEQ ID NO: 368
  misc_feature 1..711: note = Synthetic
  source 1..711: mol_type = other DNA

SEQ ID NO: 2613 - DNA, 711 bp, synthetic construct; identical to SEQ ID NO: 384
  misc_feature 1..711: note = Synthetic
  source 1..711: mol_type = other DNA

SEQ ID NO: 2614 - DNA, 711 bp, synthetic construct; identical to SEQ ID NO: 496
  misc_feature 1..711: note = Synthetic
  source 1..711: mol_type = other DNA

SEQ ID NO: 2615 - DNA, 711 bp, synthetic construct; identical to SEQ ID NO: 480
  misc_feature 1..711: note = Synthetic
  source 1..711: mol_type = other DNA

SEQ ID NO: 2616 - DNA, 711 bp, synthetic construct; identical to SEQ ID NO: 400
  misc_feature 1..711: note = Synthetic
  source 1..711: mol_type = other DNA

SEQ ID NO: 2617 - DNA, 711 bp, synthetic construct; identical to SEQ ID NO: 416
  misc_feature 1..711: note = Synthetic
  source 1..711: mol_type = other DNA

SEQ ID NO: 2618 - DNA, 711 bp, synthetic construct; identical to SEQ ID NO: 432
  misc_feature 1..711: note = Synthetic
  source 1..711: mol_type = other DNA

SEQ ID NO: 2619 - DNA, 711 bp, synthetic construct; identical to SEQ ID NO: 448
  misc_feature 1..711: note = Synthetic
  source 1..711: mol_type = other DNA

SEQ ID NO: 2620 - DNA, 711 bp, synthetic construct; identical to SEQ ID NO: 512
  misc_feature 1..711: note = Synthetic
  source 1..711: mol_type = other DNA

SEQ ID NO: 2621 - DNA, 714 bp, synthetic construct; identical to SEQ ID NO: 320
  misc_feature 1..714: note = Synthetic
  source 1..714: mol_type = other DNA

SEQ ID NO: 2622 - DNA, 711 bp, synthetic construct; identical to SEQ ID NO: 368
  misc_feature 1..711: note = Synthetic
  source 1..711: mol_type = other DNA

SEQ ID NO: 2623 - DNA, 711 bp, synthetic construct; identical to SEQ ID NO: 384
  misc_feature 1..711: note = Synthetic
  source 1..711: mol_type = other DNA

SEQ ID NO: 2624 - DNA, 711 bp, synthetic construct; identical to SEQ ID NO: 400
  misc_feature 1..711: note = Synthetic
  source 1..711: mol_type = other DNA

SEQ ID NO: 2625 - DNA, 711 bp, synthetic construct; identical to SEQ ID NO: 432
  misc_feature 1..711: note = Synthetic
  source 1..711: mol_type = other DNA

SEQ ID NO: 2626 - DNA, 711 bp, synthetic construct; identical to SEQ ID NO: 448
  misc_feature 1..711: note = Synthetic
  source 1..711: mol_type = other DNA

SEQ ID NO: 2627 - DNA, 711 bp, synthetic construct
  misc_feature 1..711: note = Synthetic
  source 1..711: mol_type = other DNA
atggacatgagggtgcccgctcagctcctggggctcctgctgctgtggctgagaggtgcgcgctgtgacatccagatgacccagtctccatcctccctgtctgcatctgtaggagacagagtcaccatcacttgccaggcgagtcaggacattaacaaccatttaaattggtatcagcagaaaccagggaaagcccctaagctcctgatctacgatgtatccaatttggaaacaggggtcccatcacgtttcagtggaagtggaagcgggacagattttactttcaccatcagcagcctgcagcctgaagatatcgcaacatattattgtcaacagtatgataaactcccgctcacttttggcggagggaccaaggtggagatcaagcgcacggtggctgcaccatctgtcttcatcttcccgccatctgatgagcagttgaaatctggaactgcctctgttgtgtgcctgctgaataacttctatcccagagaggccaaagtacagtggaaggtggataacgccctccaatcgggtaactcccaggagagtgtcacagagcaggacagcaaggacagcacctacagcctcagcagcaccctgacgctgagcaaagcagactacgagaaacacaaagtctacgcctgcgaagtcacccatcagggcctgagctcgcccgtcacaaagagcttcaacaggggagagtgttag

SEQ ID NO: 2628 - DNA, 711 bp, synthetic construct; identical to SEQ ID NO: 2627
  misc_feature 1..711: note = Synthetic
  source 1..711: mol_type = other DNA

SEQ ID NO: 2629 - DNA, 711 bp, synthetic construct
  misc_feature 1..711: note = Synthetic
  source 1..711: mol_type = other DNA
atggacatgagggtgcccgctcagctcctggggctcctgctgctgtggctgagaggtgcgcgctgtgacatccagatgacccagtctccatcttccgtgtctgcatctgtaggagacagagtcaccatcacttgtcgggcgagtcaggggattagcaggtggttagcctggtatcagcagaaacaagggaaagcccctaagctcctgatctatatggtatccagtttgcaaagtggggtcccatcaaggttcagtggcagtggatctgggacagatttcactctcaccatcagcagcctgcagcctgaagattttgcaacttactattgtcagcagtctcacaatttcccgatcaccttcggccaagggacacgactggacattaaacgaacggtggctgcaccatctgtcttcatcttcccgccatctgatgagcagttgaaatctggaactgcctctgttgtgtgcctgctgaataacttctatcccagagaggccaaagtacagtggaaggtggataacgccctccaatcgggtaactcccaggagagtgtcacagagcaggacagcaaggacagcacctacagcctcagcagcaccctgacgctgagcaaagcagactacgagaaacacaaagtctacgcctgcgaagtcacccatcagggcctgagctcgcccgtcacaaagagcttcaacaggggagagtgttag

SEQ ID NO: 2630 - DNA, 711 bp, synthetic construct; identical to SEQ ID NO: 2629
  misc_feature 1..711: note = Synthetic
  source 1..711: mol_type = other DNA

SEQ ID NO: 2631 - DNA, 711 bp, synthetic construct; identical to SEQ ID NO: 2629
  misc_feature 1..711: note = Synthetic
  source 1..711: mol_type = other DNA

SEQ ID NO: 2632 - DNA, 711 bp, synthetic construct
  misc_feature 1..711: note = Synthetic
  source 1..711: mol_type = other DNA
atggacatgagggtgcccgctcagctcctggggctcctgctgctgtggctgagaggtgcgcgctgtgacatccagatgacccagtctccatcttccgtgtctgcatctgtaggagacagagtcaccatcacttgtcgggcgagtcaggggattagcaggtggttagcctggtatcagcagaaacctgggaaagcccctaagctcctgatctatatggtatccagtttgcaaagtggggtcccatcaaggttcagtggcagtggatctgggacagatttcactctcaccatcagcagcctgcagcctgaagattttgcaacttactattgtcagcagtctcacaatttcccgatcaccttcggccaagggacacgactggacattaaacgaacggtggctgcaccatctgtcttcatcttcccgccatctgatgagcagttgaaatctggaactgcctctgttgtgtgcctgctgaataacttctatcccagagaggccaaagtacagtggaaggtggataacgccctccaatcgggtaactcccaggagagtgtcacagagcaggacagcaaggacagcacctacagcctcagcagcaccctgacgctgagcaaagcagactacgagaaacacaaagtctacgcctgcgaagtcacccatcagggcctgagctcgcccgtcacaaagagcttcaacaggggagagtgttag

SEQ ID NO: 2633 - DNA, 711 bp, synthetic construct; identical to SEQ ID NO: 2629
  misc_feature 1..711: note = Synthetic
  source 1..711: mol_type = other DNA

SEQ ID NO: 2634 - DNA, 711 bp, synthetic construct
  misc_feature 1..711: note = Synthetic
  source 1..711: mol_type = other DNA
atggacatgagggtgcccgctcagctcctggggctcctgctgctgtggctgagaggtgcgcgctgtgacacccagatgacccagtctccatcctccctgtctgcatctgttggagacagagtcaccatcacttgccaggcgagtcaggacattttcaacgatttaaattggtatcaggagaaaccagggaaagcccctaagctcctgatctaccatgcatccaatttggaaacaggggtcccatcaaggttcagtggaagtggatctgggacagattttactttcaccatcagcagcctgcagcctgaagatattgctacatattactgtcaacaatatggaaatctcccgctcactttcggcggagggaccaaggtggagatcaaacgaacggtggctgcaccatctgtcttcatcttcccgccatctgatgagcagttgaaatctggaactgcctctgttgtgtgcctgctgaataacttctatcccagagaggccaaagtacagtggaaggtggataacgccctccaatcgggtaactcccaggagagtgtcacagagcaggacagcaaggacagcacctacagcctcagcagcaccctgacgctgagcaaagcagactacgagaaacacaaagtctacgcctgcgaagtcacccatcagggcctgagctcgcccgtcacaaagagcttcaacaggggagagtgttag

SEQ ID NO: 2635 - DNA, 711 bp, synthetic construct
  misc_feature 1..711: note = Synthetic
  source 1..711: mol_type = other DNA
atggacatgagggtgcccgctcagctcctggggctcctgctgctgtggctgagaggtgcgcgctgtgacacccagatgacccagtctccatcctccctgtctgcatctgttggagacagagtcaccatcacttgccaggcgagtcaggacattttcaacgatttaaattggtatcagcaaaaaccagggaaagcccctaagctcctgatctaccatgcatccaatttggaaacaggggtcccatcaaggttcagtggaagtggatctgggacagattatactttcaccatcagcagcctgcagcctgaagatattgctacatattactgtcaacaatatggaaatctcccgctcactttcggcggagggaccaaggtggagatcaaacgaacggtggctgcaccatctgtcttcatcttcccgccatctgatgagcagttgaaatctggaactgcctctgttgtgtgcctgctgaataacttctatcccagagaggccaaagtacagtggaaggtggataacgccctccaatcgggtaactcccaggagagtgtcacagagcaggacagcaaggacagcacctacagcctcagcagcaccctgacgctgagcaaagcagactacgagaaacacaaagtctacgcctgcgaagtcacccatcagggcctgagctcgcccgtcacaaagagcttcaacaggggagagtgttag

SEQ ID NO: 2636 - DNA, 711 bp, synthetic construct
  misc_feature 1..711: note = Synthetic
  source 1..711: mol_type = other DNA
atggacatgagggtgcccgctcagctcctggggctcctgctgctgtggctgagaggtgcgcgctgtgacacccagatgacccagtctccatcctccctgtctgcatctgttggagacagagtcaccatcacttgccaggcgagtcaggacattttcaacgatttaaattggtatcaggagaaaccagggaaagcccctaagctcctgatctaccatgcatccaatttggaaacaggggtcccatcaaggttcagtggaagtggatctgggacagattatactttcaccatcagcagcctgcagcctgaagatattgctacatattactgtcaacaatatggaaatctcccgctcactttcggcggagggaccaaggtggagatcaaacgaacggtggctgcaccatctgtcttcatcttcccgccatctgatgagcagttgaaatctggaactgcctctgttgtgtgcctgctgaataacttctatcccagagaggccaaagtacagtggaaggtggataacgccctccaatcgggtaactcccaggagagtgtcacagagcaggacagcaaggacagcacctacagcctcagcagcaccctgacgctgagcaaagcagactacgagaaacacaaagtctacgcctgcgaagtcacccatcagggcctgagctcgcccgtcacaaagagcttcaacaggggagagtgttag

SEQ ID NO: 2637 - DNA, 711 bp, synthetic construct
  misc_feature 1..711: note = Synthetic
  source 1..711: mol_type = other DNA
atggacatgagggtgcccgctcagctcctggggctcctgctgctgtggctgagaggtgcgcgctgtgacatccagatgacccagtctccatcctccctgtctgcatctgtaggagacagagtcaccatcacttgccaggcgagtcgggacattagcaagtatttaaattggtatcaacagaaaccagggaaagcccccaaactccttatctacgatgcatccaatttggaaacaggggtcccatcaaggttcagtggaagtggatctgggacagattttactttcaccatcagcagcctgcagcctgaagattttgcaacatattactgtcaacactatgataatatcccgatcacctttggccaggggacaagactggagattaaacgaacggtggctgcaccatctgtcttcatcttcccgccatctgatgagcagttgaaatctggaactgcctctgttgtgtgcctgctgaataacttctatcccagagaggccaaagtacagtggaaggtggataacgccctccaatcgggtaactcccaggagagtgtcacagagcaggacagcaaggacagcacctacagcctcagcagcaccctgacgctgagcaaagcagactacgagaaacacaaagtctacgcctgcgaagtcacccatcagggcctgagctcgcccgtcacaaagagcttcaacaggggagagtgttag

SEQ ID NO: 2638 - DNA, 711 bp, synthetic construct
  misc_feature 1..711: note = Synthetic
  source 1..711: mol_type = other DNA
atggacatgagggtgcccgctcagctcctggggctcctgctgctgtggctgagaggtgcgcgctgtgacatccagatgacccagtctccatcctccctgtctgcatctgtaggagacagagtcaccatcacttgccaggcgagtcgggacattagcaagtatttaaattggtatcaacagaaaccagggaaagcccccaaactccttatctacgatgcatccaatttggaaacaggggtcccatcaaggttcagtggaagtggatctgggacagattttactttcaccatcagcagcctgcagcctgaagatattgcaacatattactgtcaacactatgataatatcccgatcacctttggccaggggacaagactggagattaaacgaacggtggctgcaccatctgtcttcatcttcccgccatctgatgagcagttgaaatctggaactgcctctgttgtgtgcctgctgaataacttctatcccagagaggccaaagtacagtggaaggtggataacgccctccaatcgggtaactcccaggagagtgtcacagagcaggacagcaaggacagcacctacagcctcagcagcaccctgacgctgagcaaagcagactacgagaaacacaaagtctacgcctgcgaagtcacccatcagggcctgagctcgcccgtcacaaagagcttcaacaggggagagtgttag

SEQ ID NO: 2639 - DNA, 711 bp, synthetic construct; identical to SEQ ID NO: 2637
  misc_feature 1..711: note = Synthetic
  source 1..711: mol_type = other DNA

SEQ ID NO: 2640 - DNA, 711 bp, synthetic construct; identical to SEQ ID NO: 2638
  misc_feature 1..711: note = Synthetic
  source 1..711: mol_type = other DNA

SEQ ID NO: 2641 - DNA, 711 bp, synthetic construct; identical to SEQ ID NO: 2637
  misc_feature 1..711: note = Synthetic
  source 1..711: mol_type = other DNA

SEQ ID NO: 2642 - DNA, 711 bp, synthetic construct; identical to SEQ ID NO: 2637
  misc_feature 1..711: note = Synthetic
  source 1..711: mol_type = other DNA

SEQ ID NO: 2643 - DNA, 711 bp, synthetic construct; identical to SEQ ID NO: 2637
  misc_feature 1..711: note = Synthetic
  source 1..711: mol_type = other DNA

SEQ ID NO: 2644 - DNA, 711 bp, synthetic construct; identical to SEQ ID NO: 2638
  misc_feature 1..711: note = Synthetic
  source 1..711: mol_type = other DNA

SEQ ID NO: 2645 - DNA, 711 bp, synthetic construct; identical to SEQ ID NO: 368
  misc_feature 1..711: note = Synthetic
  source 1..711: mol_type = other DNA

SEQ ID NO: 2646 - DNA, 711 bp, synthetic construct; identical to SEQ ID NO: 368
  misc_feature 1..711: note = Synthetic
  source 1..711: mol_type = other DNA

SEQ ID NO: 2647 - DNA, 711 bp, synthetic construct; identical to SEQ ID NO: 368
  misc_feature 1..711: note = Synthetic
  source 1..711: mol_type = other DNA

SEQ ID NO: 2648 - DNA, 711 bp, synthetic construct
  misc_feature 1..711: note = Synthetic
  source 1..711: mol_type = other DNA
atggacatgagggtgcccgctcagctcctggggctcctgctgctgtggctgagaggtgcgcgctgtgacatccagatgacccagtctccatcctccctgtctgcatctgtaggagacagagtcaccatcacttgccaggcgagtcaggacattaggaaacatttaaattggtatcagcagaaaccagggaaagcccctaaactcctgatctacgatgcagccaatttggaaacaggggtcccatcaaggttcagtggaagtggttctgggacagattttactttcaccatcagcagcctgcagcctgaagattttgcaacatattactgtcaacactatgctaatctcccgatcaccttcggccaagggacacgactggagattaaacgaacggtggctgcaccatctgtcttcatcttcccgccatctgatgagcagttgaaatctggaactgcctctgttgtgtgcctgctgaataacttctatcccagagaggccaaagtacagtggaaggtggataacgccctccaatcgggtaactcccaggagagtgtcacagagcaggacagcaaggacagcacctacagcctcagcagcaccctgacgctgagcaaagcagactacgagaaacacaaagtctacgcctgcgaagtcacccatcagggcctgagctcgcccgtcacaaagagcttcaacaggggagagtgttag

SEQ ID NO: 2649 - DNA, 711 bp, synthetic construct; identical to SEQ ID NO: 512
  misc_feature 1..711: note = Synthetic
  source 1..711: mol_type = other DNA

SEQ ID NO: 2650 - DNA, 711 bp, synthetic construct; identical to SEQ ID NO: 2648
  misc_feature 1..711: note = Synthetic
  source 1..711: mol_type = other DNA

SEQ ID NO: 2651 - DNA, 711 bp, synthetic construct; identical to SEQ ID NO: 512
  misc_feature 1..711: note = Synthetic
  source 1..711: mol_type = other DNA

SEQ ID NO: 2652 - DNA, 711 bp, synthetic construct; identical to SEQ ID NO: 2648
  misc_feature 1..711: note = Synthetic
  source 1..711: mol_type = other DNA

SEQ ID NO: 2653 - DNA, 711 bp, synthetic construct; identical to SEQ ID NO: 2648
  misc_feature 1..711: note = Synthetic
  source 1..711: mol_type = other DNA

SEQ ID NO: 2654 - DNA, 711 bp, synthetic construct; identical to SEQ ID NO: 2648
  misc_feature 1..711: note = Synthetic
  source 1..711: mol_type = other DNA

SEQ ID NO: 2655 - DNA, 711 bp, synthetic construct
  misc_feature 1..711: note = Synthetic
  source 1..711: mol_type = other DNA
atggacatgagggtgcccgctcagctcctggggctcctgctgctgtggctgagaggtgcgcgctgtgacatccagatgacccagtctccatcctccctgtctgcatctgtaggagacagagtcaccatcacttgccaggcgagtcaggacattaggaaacatttaaattggtatcagcagaaaccagggaaagcccctaaactcctgatctacgatgcagccaatttggaaacaggggtcccatcaaggttcagtggaagtggttctgggacagattttactcttaccatcagcagcctgcagcctgaagattttgcaacatattactgtcaacactatgctaatctcccgatcaccttcggccaagggacacgactggagattaaacgaacggtggctgcaccatctgtcttcatcttcccgccatctgatgagcagttgaaatctggaactgcctctgttgtgtgcctgctgaataacttctatcccagagaggccaaagtacagtggaaggtggataacgccctccaatcgggtaactcccaggagagtgtcacagagcaggacagcaaggacagcacctacagcctcagcagcaccctgacgctgagcaaagcagactacgagaaacacaaagtctacgcctgcgaagtcacccatcagggcctgagctcgcccgtcacaaagagcttcaacaggggagagtgttag

SEQ ID NO: 2656 - DNA, 711 bp, synthetic construct; identical to SEQ ID NO: 512
  misc_feature 1..711: note = Synthetic
  source 1..711: mol_type = other DNA

SEQ ID NO: 2657 - DNA, 711 bp, synthetic construct; identical to SEQ ID NO: 512
  misc_feature 1..711: note = Synthetic
  source 1..711: mol_type = other DNA

SEQ ID NO: 2658 - DNA, 711 bp, synthetic construct; identical to SEQ ID NO: 2648
  misc_feature 1..711: note = Synthetic
  source 1..711: mol_type = other DNA

SEQ ID NO: 2659 - DNA, 693 bp, synthetic construct
  misc_feature 1..693: note = Synthetic
  source 1..693: mol_type = other DNA
atggcctgggctctgctgctcctcaccctcctcactcagggcacagggtcctgggcctcctatgagctgactcagccaccctcagtgtccgtgtccccaggacagacagccagcatcacctgctctggagataaattgggggagagacaagttagctggtatcagcaaaagccaggccagtcccctgttctggtcatctatcaagataacaagcggccctcagggatccctgagcgattctctggctccaagtctgggaacacagccactctgaccatcagcgggacccaggcaatggatgaggctgactattactgtcaggcgtgggacagaaatgtggtattcggcggagggaccaagctgaccgtcctaggtcagcccaaggctgcaccctcggtcactctgttcccgccctcctctgaggagcttcaagccaacaaggccacactggtgtgtctcatcagtgacttctacccgggagccgtgacagtggcctggaaggcagatagcagccccgtcaaggcgggagtggaaaccaccacaccctccaaacaaagcaacaacaagtacgcggccagcagctatctgagcctgacgcctgagcagtggaagtcccacagaagctacagctgccaggtcacgcatgaagggagcaccgtggagaagacagtggcccctacagaatgttcatag

SEQ ID NO: 2660 - DNA, 693 bp, synthetic construct
  misc_feature 1..693: note = Synthetic
  source 1..693: mol_type = other DNA
atggcctgggctctgctgctcctcaccctcctcactcagggcacagggtcctgggcctcctatgagctgactcagccaccctcagtgtccgtgtccccaggacagacagccagcatcacctgctctggagataaattgggggagagacaagttagctggtatcagttgaagccaggccagtcccctgttctggtcatctatcaagataacaagcggccctcagggatccctgagcgattctctggctccaagtctgggaacacagccactctgaccatcagcgggacccaggcaatggatgaggctgactattactgtcaggcgtgggacagaaatgtggtattcggcggagggaccaagctgaccgtcctaggtcagcccaaggctgcaccctcggtcactctgttcccgccctcctctgaggagcttcaagccaacaaggccacactggtgtgtctcatcagtgacttctacccgggagccgtgacagtggcctggaaggcagatagcagccccgtcaaggcgggagtggaaaccaccacaccctccaaacaaagcaacaacaagtacgcggccagcagctatctgagcctgacgcctgagcagtggaagtcccacagaagctacagctgccaggtcacgcatgaagggagcaccgtggagaagacagtggcccctacagaatgttcatag

SEQ ID NO: 2661 - DNA, 693 bp, synthetic construct
  misc_feature 1..693: note = Synthetic
  source 1..693: mol_type = other DNA
atggcctgggctctgctgctcctcaccctcctcactcagggcacagggtcctgggcctcctatgagctgactcagccaccctcagtgtccgtgtccccaggacagacagccagcatcacctgctctggagataaattgggggagagaaatgttggttggtatcagcaaaagccaggccagtcccctgttctggtcatctatcaagataacaagcggccctcagggatccctgagcgattctctggctccaagtctgggaacacagccactctgaccatcagcgggacccaggcaatggatgaggctgactattactgtcaggcgtgggacagaaatgtggtattcggcggagggaccaagctgaccgtcctaggtcagcccaaggctgcaccctcggtcactctgttcccgccctcctctgaggagcttcaagccaacaaggccacactggtgtgtctcatcagtgacttctacccgggagccgtgacagtggcctggaaggcagatagcagccccgtcaaggcgggagtggaaaccaccacaccctccaaacaaagcaacaacaagtacgcggccagcagctatctgagcctgacgcctgagcagtggaagtcccacagaagctacagctgccaggtcacgcatgaagggagcaccgtggagaagacagtggcccctacagaatgttcatag

SEQ ID NO: 2662 - DNA, 693 bp, synthetic construct
  misc_feature 1..693: note = Synthetic
  source 1..693: mol_type = other DNA
atggcctgggctctgctgctcctcaccctcctcactcagggcacagggtcctgggcctcctatgagctgactcagccaccctcagtgtccgtgtccccaggacagacagccagcatcacctgctctggagataaattgggggagagaaatgttgcttggtatcagcaaaagccaggccagtcccctgttctggtcatctatcaagataacaagcggccctcagggatccctgagcgattctctggctccaagtctgggaacacagccactctgaccatcagcgggacccaggcaatggatgaggctgactattactgtcaggcgtgggacagaaatgtggtattcggcggagggaccaagctgaccgtcctaggtcagcccaaggctgcaccctcggtcactctgttcccgccctcctctgaggagcttcaagccaacaaggccacactggtgtgtctcatcagtgacttctacccgggagccgtgacagtggcctggaaggcagatagcagccccgtcaaggcgggagtggaaaccaccacaccctccaaacaaagcaacaacaagtacgcggccagcagctatctgagcctgacgcctgagcagtggaagtcccacagaagctacagctgccaggtcacgcatgaagggagcaccgtggagaagacagtggcccctacagaatgttcatag

SEQ ID NO: 2663 - DNA, 693 bp, synthetic construct; identical to SEQ ID NO: 2660
  misc_feature 1..693: note = Synthetic
  source 1..693: mol_type = other DNA

SEQ ID NO: 2664 - DNA, 714 bp, synthetic construct
  misc_feature 1..714: note = Synthetic
  source 1..714: mol_type = other DNA
atggacatgagggtgcccgctcagctcctggggctcctgctgctgtggctgagaggtgcgcgctgtgaaatcgtgatgacgcagtctccagccactctgtctgtgtctccaggggaaagagccaccctctcctgcagggccagtcagagtgttagcagcaacttagcctggtaccagcagaaacctggccaggctcccaggctcctcatctatggtgcatccaccagggccacgggtattccagccaggttcagtggctctgggtctgggacagacttcactctcaccatcagcagcctgcagcctgaagattttgcagtttattactgtcagcacttcaagacctggcctccgctcactttcggcggagggaccaaggtggagatcaaacgaacggtggctgcaccatctgtcttcatcttcccgccatctgatgagcagttgaaatctggaactgcctctgttgtgtgcctgctgaataacttctatcccagagaggccaaagtacagtggaaggtggataacgccctccaatcgggtaactcccaggagagtgtcacagagcaggacagcaaggacagcacctacagcctcagcagcaccctgacgctgagcaaagcagactacgagaaacacaaagtctacgcctgcgaagtcacccatcagggcctgagctcgcccgtcacaaagagcttcaacaggggagagtgttag

SEQ ID NO: 2665 - DNA, 714 bp, synthetic construct
  misc_feature 1..714: note = Synthetic
  source 1..714: mol_type = other DNA
atggacatgagggtgcccgctcagctcctggggctcctgctgctgtggctgagaggtgcgcgctgtgaaatcgtgatgacgcagtctccagccactctgtctgtgtctccaggggaaagagccaccctctcctgcagggccagtcagagtgttagcagcaacttagcctggtaccagcagaaacctggccaggctcccaggctcctcatctatggtgcatccaccagggccacgggtattccagccaggttcagtggctctgggtctgggacagacttcactctcaccatcagcagcctgcagtctgaagattttgcagtttattactgtcagcacttcaagacctatcctccgctcactttcggcggagggaccaaggtggagatcaaacgaacggtggctgcaccatctgtcttcatcttcccgccatctgatgagcagttgaaatctggaactgcctctgttgtgtgcctgctgaataacttctatcccagagaggccaaagtacagtggaaggtggataacgccctccaatcgggtaactcccaggagagtgtcacagagcaggacagcaaggacagcacctacagcctcagcagcaccctgacgctgagcaaagcagactacgagaaacacaaagtctacgcctgcgaagtcacccatcagggcctgagctcgcccgtcacaaagagcttcaacaggggagagtgttag

SEQ ID NO: 2666 - DNA, 714 bp, synthetic construct
  misc_feature 1..714: note = Synthetic
  source 1..714: mol_type = other DNA
atggacatgagggtgcccgctcagctcctggggctcctgctgctgtggctgagaggtgcgcgctgtgaaatcgtgatgacgcagtctccagccactctgtctgtgtctccaggggaaagagccaccctctcctgcagggccagtcagagtgttagcagcaacttagcctggtaccagcagaaacctggccaggctcccaggctcctcatctatggtgcatccaccagggccacgggtattccagccaggttcagtggctctgggtctgggacagacttcactctcaccatcagcagcctgcagtctgaagattttgcagtttattactgtcagcacttcaagacctttcctccgctcactttcggcggagggaccaaggtggagatcaaacgaacggtggctgcaccatctgtcttcatcttcccgccatctgatgagcagttgaaatctggaactgcctctgttgtgtgcctgctgaataacttctatcccagagaggccaaagtacagtggaaggtggataacgccctccaatcgggtaactcccaggagagtgtcacagagcaggacagcaaggacagcacctacagcctcagcagcaccctgacgctgagcaaagcagactacgagaaacacaaagtctacgcctgcgaagtcacccatcagggcctgagctcgcccgtcacaaagagcttcaacaggggagagtgttag

SEQ ID NO: 2667 - DNA, 714 bp, synthetic construct
  misc_feature 1..714: note = Synthetic
  source 1..714: mol_type = other DNA
atggacatgagggtgcccgctcagctcctggggctcctgctgctgtggctgagaggtgcgcgctgtgaaatcgtgatgacgcagtctccagccactctgtctgtgtctccaggggaaagagccaccctctcctgcagggccagtcagagtgttagcagcaacttagcctggtaccagcagaaacctggccaggctcccaggctcctcatctatggtgcatccaccagggccacgggtattccagccaggttcagtggctctgggtctgggacagacttcactctcaccatcagcagcctgcagtctgaagattttgcagtttattactgtcagcacttcaagacccatcctccgctcactttcggcggagggaccaaggtggagatcaaacgaacggtggctgcaccatctgtcttcatcttcccgccatctgatgagcagttgaaatctggaactgcctctgttgtgtgcctgctgaataacttctatcccagagaggccaaagtacagtggaaggtggataacgccctccaatcgggtaactcccaggagagtgtcacagagcaggacagcaaggacagcacctacagcctcagcagcaccctgacgctgagcaaagcagactacgagaaacacaaagtctacgcctgcgaagtcacccatcagggcctgagctcgcccgtcacaaagagcttcaacaggggagagtgttag

SEQ ID NO: 2668 - DNA, 714 bp, synthetic construct
  misc_feature 1..714: note = Synthetic
  source 1..714: mol_type = other DNA
atggacatgagggtgcccgctcagctcctggggctcctgctgctgtggctgagaggtgcgcgctgtgaaatcgtgatgacgcagtctccagccactctgtctgtgtctccaggggaaagagccaccctctcctgcagggccagtcagagtgttagcagcaacttagcctggtaccagcagaaacctggccaggctcccaggctcctcatctatggtgcatccaccagggccacgggtattccagccaggttcagtggctctgggtctgggacagacttcactctcaccatcagcagcctgcagcctgaagattttgcagtttattactgtcagcacttcaagacctatcctccgctcactttcggcggagggaccaaggtggagatcaaacgaacggtggctgcaccatctgtcttcatcttcccgccatctgatgagcagttgaaatctggaactgcctctgttgtgtgcctgctgaataacttctatcccagagaggccaaagtacagtggaaggtggataacgccctccaatcgggtaactcccaggagagtgtcacagagcaggacagcaaggacagcacctacagcctcagcagcaccctgacgctgagcaaagcagactacgagaaacacaaagtctacgcctgcgaagtcacccatcagggcctgagctcgcccgtcacaaagagcttcaacaggggagagtgttag

SEQ ID NO: 2669 - protein, 14 aa, synthetic construct
  REGION 1..14: note = Synthetic
TSGSGTYYADSVKG

SEQ ID NO: 2670 - protein, 10 aa, synthetic construct
  REGION 1..10: note = Synthetic
VAGSNFLFDY

SEQ ID NO: 2671 - protein, 13 aa, synthetic construct
  REGION 1..13: note = Synthetic
GGYTSSWRWYFDL

SEQ ID NO: 2672 - protein, 14 aa, synthetic construct
  REGION 1..14: note = Synthetic
GGYTSSWSRWYFDL

SEQ ID NO: 2673 - protein, 8 aa, synthetic construct
  REGION 1..8: note = Synthetic
DYGDSFDY

SEQ ID NO: 2674 - protein, 22 aa, synthetic construct
  REGION 1..22: note = Synthetic
MDMRVPAQLLGLLLLWLRGARC

SEQ ID NO: 2675 - protein, 23 aa, synthetic construct
  REGION 1..23: note = Synthetic
MAWALLLLTLLTQGTGSWASYEL

SEQ ID NO: 2676 - protein, 6 aa, synthetic construct
  REGION 1..6: note = Synthetic
GGGSGG

SEQ ID NO: 2677 - protein, 4 aa, synthetic construct
  REGION 1..4: note = Synthetic
GGGG

SEQ ID NO: 2678 - protein, 4 aa, synthetic construct
  REGION 1..4: note = Synthetic
RPTG

SEQ ID NO: 2679 - protein, 5 aa, synthetic construct
  REGION 1..5: note = Synthetic
SGSSG

SEQ ID NO: 2680 - protein, 5 aa, synthetic construct
  REGION 1..5: note = Synthetic
GATGK

SEQ ID NO: 2681 - protein, 4 aa, synthetic construct
  REGION 1..4: note = Synthetic
VPAR

SEQ ID NO: 2682 - protein, 5 aa, synthetic construct
  REGION 1..5: note = Synthetic
SSSSG

SEQ ID NO: 2683 - protein, 5 aa, synthetic construct
  REGION 1..5: note = Synthetic
SSSPG

SEQ ID NO: 2684 - protein, 4 aa, synthetic construct
  REGION 1..4: note = Synthetic
SSGG

SEQ ID NO: 2685 - protein, 4 aa, synthetic construct
  REGION 1..4: note = Synthetic
GKTG

SEQ ID NO: 2686 - protein, 5 aa, synthetic construct
  REGION 1..5: note = Synthetic
GSGTG

SEQ ID NO: 2687 - protein, 4 aa, synthetic construct
  REGION 1..4: note = Synthetic
GGAG

SEQ ID NO: 2688 - protein, 5 aa, synthetic construct
  REGION 1..5: note = Synthetic
GSSSG

SEQ ID NO: 2689 - protein, 5 aa, synthetic construct
  REGION 1..5: note = Synthetic
RPKAT

SEQ ID NO: 2690 - protein, 4 aa, synthetic construct
  REGION 1..4: note = Synthetic
SGSG

SEQ ID NO: 2691 - protein, 5 aa, synthetic construct
  REGION 1..5: note = Synthetic
SSSGG

SEQ ID NO: 2692 - protein, 4 aa, synthetic construct
  REGION 1..4: note = Synthetic
SGGG

SEQ ID NO: 2693 - protein, 4 aa, synthetic construct
  REGION 1..4: note = Synthetic
NAGG

SEQ ID NO: 2694 - protein, 5 aa, synthetic construct
  REGION 1..5: note = Synthetic
KPGST

SEQ ID NO: 2695 - protein, 4 aa, synthetic construct
  REGION 1..4: note = Synthetic
RPSG

SEQ ID NO: 2696 - protein, 5 aa, synthetic construct
  REGION 1..5: note = Synthetic
SGSGG

SEQ ID NO: 2697 - protein, 5 aa, synthetic construct
  REGION 1..5: note = Synthetic
KGGKG

SEQ ID NO: 2698 - protein, 4 aa, synthetic construct
  REGION 1..4: note = Synthetic
GGSS

SEQ ID NO: 2699 - protein, 4 aa, synthetic construct
  REGION 1..4: note = Synthetic
KPTG

SEQ ID NO: 2700 - protein, 5 aa, synthetic construct
  REGION 1..5: note = Synthetic
GGGSS

SEQ ID NO: 2701 - protein, 4 aa, synthetic construct
  REGION 1..4: note = Synthetic
GSSS

SEQ ID NO: 2702 - protein, 5 aa, synthetic construct
  REGION 1..5: note = Synthetic
GKKAT

SEQ ID NO: 2703 - protein, 4 aa, synthetic construct
  REGION 1..4: note = Synthetic
RSSG

SEQ ID NO: 2704 - protein, 5 aa, synthetic construct
  REGION 1..5: note = Synthetic
AKVGS

SEQ ID NO: 2705 - protein, 4 aa, synthetic construct
  REGION 1..4: note = Synthetic
GGGS

SEQ ID NO: 2706 - protein, 4 aa, synthetic construct
  REGION 1..4: note = Synthetic
GGGP

SEQ ID NO: 2707 - protein, 4 aa, synthetic construct
  REGION 1..4: note = Synthetic
GGGQ

SEQ ID NO: 2708 - protein, 5 aa, synthetic construct
  REGION 1..5: note = Synthetic
GGGGG

SEQ ID NO: 2709 - protein, 8 aa, synthetic construct
  REGION 1..8: note = Synthetic
GGGSGGGS

SEQ ID NO: 2710 - protein, 10 aa, synthetic construct
  REGION 1..10: note = Synthetic
GGGGSGGGGS

SEQ ID NO: 2711 - protein, 12 aa, synthetic construct
  REGION 1..12: note = Synthetic
GGGSGGGSGGGS

SEQ ID NO: 2712 - protein, 15 aa, synthetic construct
  REGION 1..15: note = Synthetic
GGGGSGGGGSGGGGS

SEQ ID NO: 2713 - protein, 16 aa, synthetic construct
  REGION 1..16: note = Synthetic
GGGSGGGSGGGSGGGS

SEQ ID NO: 2714 - protein, 20 aa, synthetic construct
  REGION 1..20: note = Synthetic
GGGGSGGGGSGGGGSGGGGS

SEQ ID NO: 2715 - protein, 20 aa, synthetic construct
  REGION 1..20: note = Synthetic
GGGSGGGSGGGSGGGSGGGS

SEQ ID NO: 2716 - protein, 25 aa, synthetic construct
  REGION 1..25: note = Synthetic
GGGGSGGGGSGGGGSGGGGSGGGGS

SEQ ID NO: 2717 - protein, 24 aa, synthetic construct
  REGION 1..24: note = Synthetic
GGGSGGGSGGGSGGGSGGGSGGGS

SEQ ID NO: 2718 - protein, 30 aa, synthetic construct
  REGION 1..30: note = Synthetic
GGGGSGGGGSGGGGSGGGGSGGGGSGGGGS

SEQ ID NO: 2719 - protein, 23 aa, synthetic construct
  REGION 1..23: note = Synthetic
GSGSATGGSGSSASSGSGSATHL

SEQ ID NO: 2720 - protein, 23 aa, synthetic construct
  REGION 1..23: note = Synthetic
GSGSATGGSGSVASSGSGSATHL

SEQ ID NO: 2721 - protein, 23 aa, synthetic construct
  REGION 1..23: note = Synthetic
GSGSATGGSGSSASSGSGSATHL

SEQ ID NO: 2722 - protein, 23 aa, synthetic construct
  REGION 1..23: note = Synthetic
GSGSATGGSGSGASSGSGSATGS

SEQ ID NO: 2723 - protein, 5 aa, synthetic construct
  REGION 1..5: note = Synthetic
  VARIANT 4: note = Xaa is M or I
GYYXH

SEQ ID NO: 2724 - protein, 21 aa, synthetic construct
  REGION 1..21: note = Synthetic
EPSKCGGGGAASRLQSDKTHC

SEQ ID NO: 2725 - protein, 5 aa, synthetic construct
  REGION 1..5: note = Synthetic
GGGGS

SEQ ID NO: 2726 - protein, 622 aa, synthetic construct
  REGION 1..622: note = Synthetic
QVQLVQSGAEVKKPGASVKVSCKASGYTFTSYDINWVRQATGQGLEWMGRMNPKSGNAGYVQNFRGRVTMTRDTSISTAYMELSSLRSEDTAVYYCARGGRTSIWSFVFDYWGQGTLVTVSSASTKGPSVFPLAPSSKSTSGGTAALGCLVKDYFPEPVTVSWNSGALTSGVHTFPAVLQSSGLYSLSSVVTVPSSSLGTQTYICNVNHKPSNTKVDKKVEPKSCDKTHTCPPCPAPELLGGPSVFLFPPKPKDTLMISRTPEVTCVVVDVSHEDPEVKFNWYVDGVEVHNAKTKPCEEQYGSTYRCVSVLTVLHQDWLNGKEYKCKVSNKALPAPIEKTISKAKGQPREPQVYTLPPSREEMTKNQVSLTCLVKGFYPSDIAVEWESNGQPENNYKTTPPVLDSDGSFFLYSKLTVDKSRWQQGNVFSCSVMHEALHNHYTQKSLSLSPGGGGGSSPGQGTQSEQSCTHFPGNLPNMLRDLRDAFSRVKTFFQMKDQLDNKLLKESLLEDFKGYLGCQALSEMIQFYLEEVMPQAENQDPDIKAHVNSLGENLKTLRERLRRCHRFLPCENVGGSGGKSKAVEQVKNAFNKLQEKGIYKAMSEFDIFINYIEAYMTMKIRN

SEQ ID NO: 2727 - protein, 622 aa, synthetic construct
  REGION 1..622: note = Synthetic
QVQLVQSGAEVKKPGASVKVSCKASGYTFTSYDINWVRQATGQGLEWMGRMNPKSGNAGYVQNFRGRVTMTRDTSISTAYMELSSLRSEDTAVYYCARGGRTSIWSFVFDYWGQGTLVTVSSASTKGPSVFPLAPSSKSTSGGTAALGCLVKDYFPEPVTVSWNSGALTSGVHTFPAVLQSSGLYSLSSVVTVPSSSLGTQTYICNVNHKPSNTKVDKKVEPKSCDKTHTCPPCPAPELLGGPSVFLFPPKPKDTLMISRTPEVTCVVVDVSHEDPEVKFNWYVDGVEVHNAKTKPCEEQYGSTYRCVSVLTVLHQDWLNGKEYKCKVSNKALPAPIEKTISKAKGQPREPQVYTLPPSREEMTKNQVSLTCLVKGFYPSDIAVEWESNGQPENNYKTTPPVLDSDGSFFLYSKLTVDKSRWQQGNVFSCSVMHEALHNHYTQKSLSLSPGGGGGSSPGQGTQSEQSCTHFPGNLPNMLRDLRDAFSRVKTFFQMKDQLDNKLLKESLLEDFKGYLGCQALSEMIQFYLEEVMPQAENQDPDIKAHVNSLGENLKTLRERLRRCHRFLPCENAGGSGGKSKAVEQVKNAFNKLQEKGIYKAMSEFDIFINYIEAYMTMKIRN

SEQ ID NO: 2728 - protein, 622 aa, synthetic construct
  REGION 1..622: note = Synthetic
QVQLVQSGAEVKKPGASVKVSCKASGYTFTSYDINWVRQATGQGLEWMGRMNPKSGNAGYVQNFRGRVTMTRDTSISTAYMELSSLRSEDTAVYYCARGGRTSIWSFVFDYWGQGTLVTVSSASTKGPSVFPLAPSSKSTSGGTAALGCLVKDYFPEPVTVSWNSGALTSGVHTFPAVLQSSGLYSLSSVVTVPSSSLGTQTYICNVNHKPSNTKVDKKVEPKSCDKTHTCPPCPAPELLGGPSVFLFPPKPKDTLMISRTPEVTCVVVDVSHEDPEVKFNWYVDGVEVHNAKTKPCEEQYGSTYRCVSVLTVLHQDWLNGKEYKCKVSNKALPAPIEKTISKAKGQPREPQVYTLPPSREEMTKNQVSLTCLVKGFYPSDIAVEWESNGQPENNYKTTPPVLDSDGSFFLYSKLTVDKSRWQQGNVFSCSVMHEALHNHYTQKSLSLSPGGGGGSSPGQGTQSEKSCTHFPGNLPNMLRDLRDAFSRVKTFFQMKDQLDNKLLKESLLEDFKGYLGCQALSEMIQFYLEEVMPQAENQDPDIKAHVNSLGENLKTLRERLRRCHRFLPCENAGGSGGKSKAVEQVKNAFNKLQEKGIYKAMSEFDIFINYIEAYMTMKIRN

SEQ ID NO: 2729 - protein, 624 aa, synthetic construct
  REGION 1..624: note = Synthetic
QVQLVQSGAEVKKPGASVKVSCKASGYTFTSYDINWVRQATGQGLEWMGWMNPNRGNTGYVKKFQGRVTMTRDTSISTAYMELSSLRSEDTAVYYCARRRAVYRSSWEWYFDLWGRGTLVTVSSASTKGPSVFPLAPSSKSTSGGTAALGCLVKDYFPEPVTVSWNSGALTSGVHTFPAVLQSSGLYSLSSVVTVPSSSLGTQTYICNVNHKPSNTKVDKKVEPKSCDKTHTCPPCPAPELLGGPSVFLFPPKPKDTLMISRTPEVTCVVVDVSHEDPEVKFNWYVDGVEVHNAKTKPCEEQYGSTYRCVSVLTVLHQDWLNGKEYKCKVSNKALPAPIEKTISKAKGQPREPQVYTLPPSREEMTKNQVSLTCLVKGFYPSDIAVEWESNGQPENNYKTTPPVLDSDGSFFLYSKLTVDKSRWQQGNVFSCSVMHEALHNHYTQKSLSLSPGGGGGSSPGQGTQSEISCTHFPGNLPNMLRDLRDAFSRVKTFFQMKDQLDNKLLKESLLEDFKGYLGCQALSEMIQFYLEEVMPQAENQDPDIKAHVNSLGENLKTLRERLRRCHRFLPCENAGGSGGKSKAVEQVKNAFNKLQEKGIYKAMSEFDIFINYIEAYMTMKIRN

SEQ ID NO: 2730 - protein, 624 aa, synthetic construct
  REGION 1..624: note = Synthetic
QVQLVQSGAEVKKPGASVKVSCKASGYTFTSYDINWVRQATGQGLEWMGWMNPNRGNTGYVKKFQGRVTMTRDTSISTAYMELSSLRSEDTAVYYCARRRAVYRSSWEWYFDLWGRGTLVTVSSASTKGPSVFPLAPSSKSTSGGTAALGCLVKDYFPEPVTVSWNSGALTSGVHTFPAVLQSSGLYSLSSVVTVPSSSLGTQTYICNVNHKPSNTKVDKKVEPKSCDKTHTCPPCPAPELLGGPSVFLFPPKPKDTLMISRTPEVTCVVVDVSHEDPEVKFNWYVDGVEVHNAKTKPCEEQYGSTYRCVSVLTVLHQDWLNGKEYKCKVSNKALPAPIEKTISKAKGQPREPQVYTLPPSREEMTKNQVSLTCLVKGFYPSDIAVEWESNGQPENNYKTTPPVLDSDGSFFLYSKLTVDKSRWQQGNVFSCSVMHEALHNHYTQKSLSLSPGGGGGSSPGQGTQSEQSCTHFPGNLPNMLRDLRDAFSRVKTFFQMKDQLDNKLLKESLLEDFKGYLGCQALSEMIQFYLEEVMPQAENQDPDIKAHVNSLGENLKTLRERLRRCHRFLPCENAGGSGGKSKAVEQVKNAFNKLQEKGIYKAMSEFDIFINYIEAYMTMKIRN

SEQ ID NO: 2731 - protein, 624 aa, synthetic construct
  REGION 1..624: note = Synthetic
QVQLVQSGAEVKKPGASVKVSCKASGYTFTSYDINWVRQATGQGLEWMGWMNPNRGNTGYVKKFQGRVTMTRDTSISTAYMELSSLRSEDTAVYYCARRRAVYRSSWEWYFDLWGRGTLVTVSSASTKGPSVFPLAPSSKSTSGGTAALGCLVKDYFPEPVTVSWNSGALTSGVHTFPAVLQSSGLYSLSSVVTVPSSSLGTQTYICNVNHKPSNTKVDKKVEPKSCDKTHTCPPCPAPELLGGPSVFLFPPKPKDTLMISRTPEVTCVVVDVSHEDPEVKFNWYVDGVEVHNAKTKPCEEQYGSTYRCVSVLTVLHQDWLNGKEYKCKVSNKALPAPIEKTISKAKGQPREPQVYTLPPSREEMTKNQVSLTCLVKGFYPSDIAVEWESNGQPENNYKTTPPVLDSDGSFFLYSKLTVDKSRWQQGNVFSCSVMHEALHNHYTQKSLSLSPGGGGGSSPGQGTQSEQSCTHFPGNLPNMLRDLRDAFSRVKTFFQMKDQLDNKLLKESLLEDFKGYLGCQALSEMIQFYLEEVMPQAENQDPDIKAHVNSLGENLKTLRERLRRCHRFLPCENVGGSGGKSKAVEQVKNAFNKLQEKGIYKAMSEFDIFINYIEAYMTMKIRN

SEQ ID NO: 2732 - protein, 624 aa, synthetic construct
  REGION 1..624: note = Synthetic
QVQLVQSGAEVKKPGASVKVSCKASGYTFTSYDINWVRQATGQGLEWMGWMNPNRGNTGYVKKFQGRVTMTRDTSISTAYMELSSLRSEDTAVYYCARRRAVYRSSWEWYFDLWGRGTLVTVSSASTKGPSVFPLAPSSKSTSGGTAALGCLVKDYFPEPVTVSWNSGALTSGVHTFPAVLQSSGLYSLSSVVTVPSSSLGTQTYICNVNHKPSNTKVDKKVEPKSCDKTHTCPPCPAPELLGGPSVFLFPPKPKDTLMISRTPEVTCVVVDVSHEDPEVKFNWYVDGVEVHNAKTKPCEEQYGSTYRCVSVLTVLHQDWLNGKEYKCKVSNKALPAPIEKTISKAKGQPREPQVYTLPPSREEMTKNQVSLTCLVKGFYPSDIAVEWESNGQPENNYKTTPPVLDSDGSFFLYSKLTVDKSRWQQGNVFSCSVMHEALHNHYTQKSLSLSPGGGGGSSPGQGTQSEKSCTHFPGNLPNMLRDLRDAFSRVKTFFQMKDQLDNKLLKESLLEDFKGYLGCQALSEMIQFYLEEVMPQAENQDPDIKAHVNSLGENLKTLRERLRRCHRFLPCENAGGSGGKSKAVEQVKNAFNKLQEKGIYKAMSEFDIFINYIEAYMTMKIRN

SEQ ID NO: 2733 - protein, 622 aa, synthetic construct
  REGION 1..622: note = Synthetic
QVQLVQSGAEVKKPGASVKVSCKASGYTFTSYDINWVRQATGQGLEWMGRMNPKSGNAGYVQNFRGRVTMTRDTSISTAYMELSSLRSEDTAVYYCARGGRTSIWSFVFDYWGQGTLVTVSSASTKGPSVFPLAPSSKSTSGGTAALGCLVKDYFPEPVTVSWNSGALTSGVHTFPAVLQSSGLYSLSSVVTVPSSSLGTQTYICNVNHKPSNTKVDKKVEPKSCDKTHTCPPCPAPELLGGPSVFLFPPKPKDTLMISRTPEVTCVVVDVSHEDPEVKFNWYVDGVEVHNAKTKPCEEQYGSTYRCVSVLTVLHQDWLNGKEYKCKVSNKALPAPIEKTISKAKGQPREPQVYTLPPSREEMTKNQVSLTCLVKGFYPSDIAVEWESNGQPENNYKTTPPVLDSDGSFFLYSKLTVDKSRWQQGNVFSCSVMHEALHNHYTQKSLSLSPGGGGGSSPGQGTQSEQSCTHFPGNLPNMLRDLRDAFSRVKTFFQMKDQLDNKLLKESLLEDFKGYLGCQALSEMIQFYLEEVMPQAENQDPDIKAHVNSLGENLKTLRLRLRRCHPFLPCENAGGSGGKSKAVEQVKNAFNKLQEKGIYKAMSEFDIFINYIEAYMTMKIRN

SEQ ID NO: 2734 - protein, 622 aa, synthetic construct
  REGION 1..622: note = Synthetic
QVQLVQSGAEVKKPGASVKVSCKASGYTFTSYDINWVRQATGQGLEWMGRMNPKSGNAGYVQNFRGRVTMTRDTSISTAYMELSSLRSEDTAVYYCARGGRTSIWSFVFDYWGQGTLVTVSSASTKGPSVFPLAPSSKSTSGGTAALGCLVKDYFPEPVTVSWNSGALTSGVHTFPAVLQSSGLYSLSSVVTVPSSSLGTQTYICNVNHKPSNTKVDKKVEPKSCDKTHTCPPCPAPELLGGPSVFLFPPKPKDTLMISRTPEVTCVVVDVSHEDPEVKFNWYVDGVEVHNAKTKPCEEQYGSTYRCVSVLTVLHQDWLNGKEYKCKVSNKALPAPIEKTISKAKGQPREPQVYTLPPSREEMTKNQVSLTCLVKGFYPSDIAVEWESNGQPENNYKTTPPVLDSDGSFFLYSKLTVDKSRWQQGNVFSCSVMHEALHNHYTQKSLSLSPGGGGGSSPGQGTQSENSCTHFPGNLPNMLRDLRDAFSRVKTFFQMKDQLDNKLLKESLLEDFKGYLGCQALSEMIQFYLEEVMPQAENQDPDIKAHVNSLGENLKTLRLRLRRCHPFLPCENAGGSGGKSKAVEQVKNAFNKLQEKGIYKAMSEFDIFINYIEAYMTMKIRN

SEQ ID NO: 2735 - protein, 622 aa, synthetic construct
  REGION 1..622: note = Synthetic
QVQLVQSGAEVKKPGASVKVSCKASGYTFTSYDINWVRQATGQGLEWMGRMNPKSGNAGYVQNFRGRVTMTRDTSISTAYMELSSLRSEDTAVYYCARGGRTSIWSFVFDYWGQGTLVTVSSASTKGPSVFPLAPSSKSTSGGTAALGCLVKDYFPEPVTVSWNSGALTSGVHTFPAVLQSSGLYSLSSVVTVPSSSLGTQTYICNVNHKPSNTKVDKKVEPKSCDKTHTCPPCPAPELLGGPSVFLFPPKPKDTLMISRTPEVTCVVVDVSHEDPEVKFNWYVDGVEVHNAKTKPCEEQYGSTYRCVSVLTVLHQDWLNGKEYKCKVSNKALPAPIEKTISKAKGQPREPQVYTLPPSREEMTKNQVSLTCLVKGFYPSDIAVEWESNGQPENNYKTTPPVLDSDGSFFLYSKLTVDKSRWQQGNVFSCSVMHEALHNHYTQKSLSLSPGGGGGSSPGQGTQSEISCTHFPGNLPNMLRDLRDAFSRVKTFFQMKDQLDNKLLKESLLEDFKGYLGCQALSEMIQFYLEEVMPQAENQDPDIKAHVNSLGENLKTLRERLRRCHPFLPCENAGGSGGKSKAVEQVKNAFNKLQEKGIYKAMSEFDIFINYIEAYMTMKIRN

SEQ ID NO: 2736 - protein, 622 aa, synthetic construct
  REGION 1..622: note = Synthetic
QVQLVQSGAEVKKPGASVKVSCKASGYTFTSYDINWVRQATGQGLEWMGRMNPKSGNAGYVQNFRGRVTMTRDTSISTAYMELSSLRSEDTAVYYCARGGRTSIWSFVFDYWGQGTLVTVSSASTKGPSVFPLAPSSKSTSGGTAALGCLVKDYFPEPVTVSWNSGALTSGVHTFPAVLQSSGLYSLSSVVTVPSSSLGTQTYICNVNHKPSNTKVDKKVEPKSCDKTHTCPPCPAPELLGGPSVFLFPPKPKDTLMISRTPEVTCVVVDVSHEDPEVKFNWYVDGVEVHNAKTKPCEEQYGSTYRCVSVLTVLHQDWLNGKEYKCKVSNKALPAPIEKTISKAKGQPREPQVYTLPPSREEMTKNQVSLTCLVKGFYPSDIAVEWESNGQPENNYKTTPPVLDSDGSFFLYSKLTVDKSRWQQGNVFSCSVMHEALHNHYTQKSLSLSPGGGGGSSPGQGTQSENSCTHFPGNLPNMLRDLRDAFSRVKTFFQMKDQLDNKLLKESLLEDFKGYLGCQALSEMIQFYLEEVMPQAENQDPDIKAHVNSLGENLKTLRERLRRCHRFLPCENVGGSGGKSKAVEQVKNAFNKLQEKGIYKAMSEFDIFINYIEAYMTMKIRN

SEQ ID NO: 2737 - protein, 622 aa, synthetic construct
  REGION 1..622: note = Synthetic
QVQLVQSGAEVKKPGASVKVSCKASGYTFTSYDINWVRQATGQGLEWMGRMNPKSGNAGYVQNFRGRVTMTRDTSISTAYMELSSLRSEDTAVYYCARGGRTSIWSFVFDYWGQGTLVTVSSASTKGPSVFPLAPSSKSTSGGTAALGCLVKDYFPEPVTVSWNSGALTSGVHTFPAVLQSSGLYSLSSVVTVPSSSLGTQTYICNVNHKPSNTKVDKKVEPKSCDKTHTCPPCPAPELLGGPSVFLFPPKPKDTLMISRTPEVTCVVVDVSHEDPEVKFNWYVDGVEVHNAKTKPCEEQYGSTYRCVSVLTVLHQDWLNGKEYKCKVSNKALPAPIEKTISKAKGQPREPQVYTLPPSREEMTKNQVSLTCLVKGFYPSDIAVEWESNGQPENNYKTTPPVLDSDGSFFLYSKLTVDKSRWQQGNVFSCSVMHEALHNHYTQKSLSLSPGGGGGSSPGQGTQSEISCTHFPGNLPNMLRDLRDAFSRVKTFFQMKDQLDNKLLKESLLEDFKGYLGCQALSEMIQFYLEEVMPQAENQDPDIKAHVNSLGENLKTLRLRLRRCHPFLPCENAGGSGGKSKAVEQVKNAFNKLQEKGIYKAMSEFDIFINYIEAYMTMKIRN

SEQ ID NO: 2738 - protein, 622 aa, synthetic construct
  REGION 1..622: note = Synthetic
QVQLVQSGAEVKKPGASVKVSCKASGYTFTSYDINWVRQATGQGLEWMGRMNPKSGNAGYVQNFRGRVTMTRDTSISTAYMELSSLRSEDTAVYYCARGGRTSIWSFVFDYWGQGTLVTVSSASTKGPSVFPLAPSSKSTSGGTAALGCLVKDYFPEPVTVSWNSGALTSGVHTFPAVLQSSGLYSLSSVVTVPSSSLGTQTYICNVNHKPSNTKVDKKVEPKSCDKTHTCPPCPAPELLGGPSVFLFPPKPKDTLMISRTPEVTCVVVDVSHEDPEVKFNWYVDGVEVHNAKTKPCEEQYGSTYRCVSVLTVLHQDWLNGKEYKCKVSNKALPAPIEKTISKAKGQPREPQVYTLPPSREEMTKNQVSLTCLVKGFYPSDIAVEWESNGQPENNYKTTPPVLDSDGSFFLYSKLTVDKSRWQQGNVFSCSVMHEALHNHYTQKSLSLSPGGGGGSSPGQGTQSENSCTHFPGNLPNMLRDLRDAFSRVKTFFQMKDQLDNKLLKESLLEDFKGYLGCQALSEMIQFYLEEVMPQAENQDPDIKAHVNSLGENLKTLRERLRRCHRFLPCENAGGSGGKSKAVEQVKNAFNKLQEKGIYKAMSEFDIFINYIEAYMTMKIRN

SEQ ID NO: 2739 - protein, 624 aa, synthetic construct
  REGION 1..624: note = Synthetic
QVQLVQSGAEVKKPGASVKVSCKASGYTFTSYDINWVRQATGQGLEWMGWMNPNRGNTGYVKKFQGRVTMTRDTSISTAYMELSSLRSEDTAVYYCARRRAVYRSSWEWYFDLWGRGTLVTVSSASTKGPSVFPLAPSSKSTSGGTAALGCLVKDYFPEPVTVSWNSGALTSGVHTFPAVLQSSGLYSLSSVVTVPSSSLGTQTYICNVNHKPSNTKVDKKVEPKSCDKTHTCPPCPAPELLGGPSVFLFPPKPKDTLMISRTPEVTCVVVDVSHEDPEVKFNWYVDGVEVHNAKTKPCEEQYGSTYRCVSVLTVLHQDWLNGKEYKCKVSNKALPAPIEKTISKAKGQPREPQVYTLPPSREEMTKNQVSLTCLVKGFYPSDIAVEWESNGQPENNYKTTPPVLDSDGSFFLYSKLTVDKSRWQQGNVFSCSVMHEALHNHYTQKSLSLSPGGGGGSSPGQGTQSEISCTHFPGNLPNMLRDLRDAFSRVKTFFQMKDQLDNKLLKESLLEDFKGYLGCQALSEMIQFYLEEVMPQAENQDPDIKAHVNSLGENLKTLRERLRRCHPFLPCENAGGSGGKSKAVEQVKNAFNKLQEKGIYKAMSEFDIFINYIEAYMTMKIRN

SEQ ID NO: 2740 - protein, 624 aa, synthetic construct
  REGION 1..624: note = Synthetic
QVQLVQSGAEVKKPGASVKVSCKASGYTFTSYDINWVRQATGQGLEWMGWMNPNRGNTGYVKKFQGRVTMTRDTSISTAYMELSSLRSEDTAVYYCARRRAVYRSSWEWYFDLWGRGTLVTVSSASTKGPSVFPLAPSSKSTSGGTAALGCLVKDYFPEPVTVSWNSGALTSGVHTFPAVLQSSGLYSLSSVVTVPSSSLGTQTYICNVNHKPSNTKVDKKVEPKSCDKTHTCPPCPAPELLGGPSVFLFPPKPKDTLMISRTPEVTCVVVDVSHEDPEVKFNWYVDGVEVHNAKTKPCEEQYGSTYRCVSVLTVLHQDWLNGKEYKCKVSNKALPAPIEKTISKAKGQPREPQVYTLPPSREEMTKNQVSLTCLVKGFYPSDIAVEWESNGQPENNYKTTPPVLDSDGSFFLYSKLTVDKSRWQQGNVFSCSVMHEALHNHYTQKSLSLSPGGGGGSSPGQGTQSEISCTHFPGNLPNMLRDLRDAFSRVKTFFQMKDQLDNKLLKESLLEDFKGYLGCQALSEMIQFYLEEVMPQAENQDPDIKAHVNSLGENLKTLRLRLRRCHPFLPCENAGGSGGKSKAVEQVKNAFNKLQEKGIYKAMSEFDIFINYIEAYMTMKIRN

SEQ ID NO: 2741 - protein, 624 aa, synthetic construct
  REGION 1..624: note = Synthetic
QVQLVQSGAEVKKPGASVKVSCKASGYTFTSYDINWVRQATGQGLEWMGWMNPNRGNTGYVKKFQGRVTMTRDTSISTAYMELSSLRSEDTAVYYCARRRAVYRSSWEWYFDLWGRGTLVTVSSASTKGPSVFPLAPSSKSTSGGTAALGCLVKDYFPEPVTVSWNSGALTSGVHTFPAVLQSSGLYSLSSVVTVPSSSLGTQTYICNVNHKPSNTKVDKKVEPKSCDKTHTCPPCPAPELLGGPSVFLFPPKPKDTLMISRTPEVTCVVVDVSHEDPEVKFNWYVDGVEVHNAKTKPCEEQYGSTYRCVSVLTVLHQDWLNGKEYKCKVSNKALPAPIEKTISKAKGQPREPQVYTLPPSREEMTKNQVSLTCLVKGFYPSDIAVEWESNGQPENNYKTTPPVLDSDGSFFLYSKLTVDKSRWQQGNVFSCSVMHEALHNHYTQKSLSLSPGGGGGSSPGQGTQSEQSCTHFPGNLPNMLRDLRDAFSRVKTFFQMKDQLDNKLLKESLLEDFKGYLGCQALSEMIQFYLEEVMPQAENQDPDIKAHVNSLGENLKTLRLRLRRCHPFLPCENAGGSGGKSKAVEQVKNAFNKLQEKGIYKAMSEFDIFINYIEAYMTMKIRN

SEQ ID NO: 2742 - protein, 624 aa, synthetic construct
  REGION 1..624: note = Synthetic
QVQLVQSGAEVKKPGASVKVSCKASGYTFTSYDINWVRQATGQGLEWMGWMNPNRGNTGYVKKFQGRVTMTRDTSISTAYMELSSLRSEDTAVYYCARRRAVYRSSWEWYFDLWGRGTLVTVSSASTKGPSVFPLAPSSKSTSGGTAALGCLVKDYFPEPVTVSWNSGALTSGVHTFPAVLQSSGLYSLSSVVTVPSSSLGTQTYICNVNHKPSNTKVDKKVEPKSCDKTHTCPPCPAPELLGGPSVFLFPPKPKDTLMISRTPEVTCVVVDVSHEDPEVKFNWYVDGVEVHNAKTKPCEEQYGSTYRCVSVLTVLHQDWLNGKEYKCKVSNKALPAPIEKTISKAKGQPREPQVYTLPPSREEMTKNQVSLTCLVKGFYPSDIAVEWESNGQPENNYKTTPPVLDSDGSFFLYSKLTVDKSRWQQGNVFSCSVMHEALHNHYTQKSLSLSPGGGGGSSPGQGTQSENSCTHFPGNLPNMLRDLRDAFSRVKTFFQMKDQLDNKLLKESLLEDFKGYLGCQALSEMIQFYLEEVMPQAENQDPDIKAHVNSLGENLKTLRERLRRCHRFLPCENAGGSGGKSKAVEQVKNAFNKLQEKGIYKAMSEFDIFINYIEAYMTMKIRN

SEQ ID NO: 2743 - protein, 624 aa, synthetic construct
  REGION 1..624: note = Synthetic
QVQLVQSGAEVKKPGASVKVSCKASGYTFTSYDINWVRQATGQGLEWMGWMNPNRGNTGYVKKFQGRVTMTRDTSISTAYMELSSLRSEDTAVYYCARRRAVYRSSWEWYFDLWGRGTLVTVSSASTKGPSVFPLAPSSKSTSGGTAALGCLVKDYFPEPVTVSWNSGALTSGVHTFPAVLQSSGLYSLSSVVTVPSSSLGTQTYICNVNHKPSNTKVDKKVEPKSCDKTHTCPPCPAPELLGGPSVFLFPPKPKDTLMISRTPEVTCVVVDVSHEDPEVKFNWYVDGVEVHNAKTKPCEEQYGSTYRCVSVLTVLHQDWLNGKEYKCKVSNKALPAPIEKTISKAKGQPREPQVYTLPPSREEMTKNQVSLTCLVKGFYPSDIAVEWESNGQPENNYKTTPPVLDSDGSFFLYSKLTVDKSRWQQGNVFSCSVMHEALHNHYTQKSLSLSPGGGGGSSPGQGTQSENSCTHFPGNLPNMLRDLRDAFSRVKTFFQMKDQLDNKLLKESLLEDFKGYLGCQALSEMIQFYLEEVMPQAENQDPDIKAHVNSLGENLKTLRERLRRCHRFLPCENVGGSGGKSKAVEQVKNAFNKLQEKGIYKAMSEFDIFINYIEAYMTMKIRN

SEQ ID NO: 2744 - protein, 628 aa, synthetic construct
  REGION 1..628: note = Synthetic
SPGQGTQSENSCTHFPGNLPNMLRDLRDAFSRVKTFFQMKDQLDNKLLKESLLEDFKGYLGCQALSEMIQFYLEEVMPQAENQDPDIKAHVNSLGENLKTLRERLRRCHRFLPCENAGGSGGKSKAVEQVKNAFNKLQEKGIYKAMSEFDIFINYIEAYMTMKIRNGGGGSGGGGSQVQLVQSGAEVKKPGASVKVSCKASGYTFTSYDINWVRQATGQGLEWMGRMNPKSGNAGYVQNFRGRVTMTRDTSISTAYMELSSLRSEDTAVYYCARGGRTSIWSFVFDYWGQGTLVTVSSASTKGPSVFPLAPSSKSTSGGTAALGCLVKDYFPEPVTVSWNSGALTSGVHTFPAVLQSSGLYSLSSVVTVPSSSLGTQTYICNVNHKPSNTKVDKKVEPKSCDKTHTCPPCPAPELLGGPSVFLFPPKPKDTLMISRTPEVTCVVVDVSHEDPEVKFNWYVDGVEVHNAKTKPCEEQYGSTYRCVSVLTVLHQDWLNGKEYKCKVSNKALPAPIEKTISKAKGQPREPQVYTLPPSREEMTKNQVSLTCLVKGFYPSDIAVEWESNGQPENNYKTTPPVLDSDGSFFLYSKLTVDKSRWQQGNVFSCSVMHEALHNHYTQKSLSLSPGK

SEQ ID NO: 2745 - protein, 630 aa, synthetic construct
  REGION 1..630: note = Synthetic
SPGQGTQSENSCTHFPGNLPNMLRDLRDAFSRVKTFFQMKDQLDNKLLKESLLEDFKGYLGCQALSEMIQFYLEEVMPQAENQDPDIKAHVNSLGENLKTLRERLRRCHRFLPCENAGGSGGKSKAVEQVKNAFNKLQEKGIYKAMSEFDIFINYIEAYMTMKIRNGGGGSGGGGSQVQLVQSGAEVKKPGASVKVSCKASGYTFTSYDINWVRQATGQGLEWMGWMNPNRGNTGYVKKFQGRVTMTRDTSISTAYMELSSLRSEDTAVYYCARRRAVYRSSWEWYFDLWGRGTLVTVSSASTKGPSVFPLAPSSKSTSGGTAALGCLVKDYFPEPVTVSWNSGALTSGVHTFPAVLQSSGLYSLSSVVTVPSSSLGTQTYICNVNHKPSNTKVDKKVEPKSCDKTHTCPPCPAPELLGGPSVFLFPPKPKDTLMISRTPEVTCVVVDVSHEDPEVKFNWYVDGVEVHNAKTKPCEEQYGSTYRCVSVLTVLHQDWLNGKEYKCKVSNKALPAPIEKTISKAKGQPREPQVYTLPPSREEMTKNQVSLTCLVKGFYPSDIAVEWESNGQPENNYKTTPPVLDSDGSFFLYSKLTVDKSRWQQGNVFSCSVMHEALHNHYTQKSLSLSPGK

SEQ ID NO: 2746 - protein, 628 aa, synthetic construct
  REGION 1..628: note = Synthetic
SPGQGTQSENSCTHFPGNLPNMLRDLRDAFSRVKTFFQMKDQLDNKLLKESLLEDFKGYLGCQALSEMIQFYLEEVMPQAENQDPDIKAHVNSLGENLKTLRERLRRCHRFLPCENVGGSGGKSKAVEQVKNAFNKLQEKGIYKAMSEFDIFINYIEAYMTMKIRNGGGGSGGGGSQVQLVQSGAEVKKPGASVKVSCKASGYTFTSYDINWVRQATGQGLEWMGRMNPKSGNAGYVQNFRGRVTMTRDTSISTAYMELSSLRSEDTAVYYCARGGRTSIWSFVFDYWGQGTLVTVSSASTKGPSVFPLAPSSKSTSGGTAALGCLVKDYFPEPVTVSWNSGALTSGVHTFPAVLQSSGLYSLSSVVTVPSSSLGTQTYICNVNHKPSNTKVDKKVEPKSCDKTHTCPPCPAPELLGGPSVFLFPPKPKDTLMISRTPEVTCVVVDVSHEDPEVKFNWYVDGVEVHNAKTKPCEEQYGSTYRCVSVLTVLHQDWLNGKEYKCKVSNKALPAPIEKTISKAKGQPREPQVYTLPPSREEMTKNQVSLTCLVKGFYPSDIAVEWESNGQPENNYKTTPPVLDSDGSFFLYSKLTVDKSRWQQGNVFSCSVMHEALHNHYTQKSLSLSPGK

SEQ ID NO: 2747 - protein, 630 aa, synthetic construct
  REGION 1..630: note = Synthetic
SPGQGTQSENSCTHFPGNLPNMLRDLRDAFSRVKTFFQMKDQLDNKLLKESLLEDFKGYLGCQALSEMIQFYLEEVMPQAENQDPDIKAHVNSLGENLKTLRERLRRCHRFLPCENVGGSGGKSKAVEQVKNAFNKLQEKGIYKAMSEFDIFINYIEAYMTMKIRNGGGGSGGGGSQVQLVQSGAEVKKPGASVKVSCKASGYTFTSYDINWVRQATGQGLEWMGWMNPNRGNTGYVKKFQGRVTMTRDTSISTAYMELSSLRSEDTAVYYCARRRAVYRSSWEWYFDLWGRGTLVTVSSASTKGPSVFPLAPSSKSTSGGTAALGCLVKDYFPEPVTVSWNSGALTSGVHTFPAVLQSSGLYSLSSVVTVPSSSLGTQTYICNVNHKPSNTKVDKKVEPKSCDKTHTCPPCPAPELLGGPSVFLFPPKPKDTLMISRTPEVTCVVVDVSHEDPEVKFNWYVDGVEVHNAKTKPCEEQYGSTYRCVSVLTVLHQDWLNGKEYKCKVSNKALPAPIEKTISKAKGQPREPQVYTLPPSREEMTKNQVSLTCLVKGFYPSDIAVEWESNGQPENNYKTTPPVLDSDGSFFLYSKLTVDKSRWQQGNVFSCSVMHEALHNHYTQKSLSLSPGK

SEQ ID NO: 2748 - protein, 628 aa, synthetic construct
  REGION 1..628: note = Synthetic
SPGQGTQSEISCTHFPGNLPNMLRDLRDAFSRVKTFFQMKDQLDNKLLKESLLEDFKGYLGCQALSEMIQFYLEEVMPQAENQDPDIKAHVNSLGENLKTLRERLRRCHRFLPCENAGGSGGKSKAVEQVKNAFNKLQEKGIYKAMSEFDIFINYIEAYMTMKIRNGGGGSGGGGSQVQLVQSGAEVKKPGASVKVSCKASGYTFTSYDINWVRQATGQGLEWMGRMNPKSGNAGYVQNFRGRVTMTRDTSISTAYMELSSLRSEDTAVYYCARGGRTSIWSFVFDYWGQGTLVTVSSASTKGPSVFPLAPSSKSTSGGTAALGCLVKDYFPEPVTVSWNSGALTSGVHTFPAVLQSSGLYSLSSVVTVPSSSLGTQTYICNVNHKPSNTKVDKKVEPKSCDKTHTCPPCPAPELLGGPSVFLFPPKPKDTLMISRTPEVTCVVVDVSHEDPEVKFNWYVDGVEVHNAKTKPCEEQYGSTYRCVSVLTVLHQDWLNGKEYKCKVSNKALPAPIEKTISKAKGQPREPQVYTLPPSREEMTKNQVSLTCLVKGFYPSDIAVEWESNGQPENNYKTTPPVLDSDGSFFLYSKLTVDKSRWQQGNVFSCSVMHEALHNHYTQKSLSLSPGK

SEQ ID NO: 2749 - protein, 630 aa, synthetic construct
  REGION 1..630: note = Synthetic
SPGQGTQSEISCTHFPGNLPNMLRDLRDAFSRVKTFFQMKDQLDNKLLKESLLEDFKGYLGCQALSEMIQFYLEEVMPQAENQDPDIKAHVNSLGENLKTLRERLRRCHRFLPCENAGGSGGKSKAVEQVKNAFNKLQEKGIYKAMSEFDIFINYIEAYMTMKIRNGGGGSGGGGSQVQLVQSGAEVKKPGASVKVSCKASGYTFTSYDINWVRQATGQGLEWMGWMNPNRGNTGYVKKFQGRVTMTRDTSISTAYMELSSLRSEDTAVYYCARRRAVYRSSWEWYFDLWGRGTLVTVSSASTKGPSVFPLAPSSKSTSGGTAALGCLVKDYFPEPVTVSWNSGALTSGVHTFPAVLQSSGLYSLSSVVTVPSSSLGTQTYICNVNHKPSNTKVDKKVEPKSCDKTHTCPPCPAPELLGGPSVFLFPPKPKDTLMISRTPEVTCVVVDVSHEDPEVKFNWYVDGVEVHNAKTKPCEEQYGSTYRCVSVLTVLHQDWLNGKEYKCKVSNKALPAPIEKTISKAKGQPREPQVYTLPPSREEMTKNQVSLTCLVKGFYPSDIAVEWESNGQPENNYKTTPPVLDSDGSFFLYSKLTVDKSRWQQGNVFSCSVMHEALHNHYTQKSLSLSPGK

SEQ ID NO: 2750 - protein, 628 aa, synthetic construct
  REGION 1..628: note = Synthetic
SPGQGTQSEISCTHFPGNLPNMLRDLRDAFSRVKTFFQMKDQLDNKLLKESLLEDFKGYLGCQALSEMIQFYLEEVMPQAENQDPDIKAHVNSLGENLKTLRERLRRCHRFLPCENVGGSGGKSKAVEQVKNAFNKLQEKGIYKAMSEFDIFINYIEAYMTMKIRNGGGGSGGGGSQVQLVQSGAEVKKPGASVKVSCKASGYTFTSYDINWVRQATGQGLEWMGRMNPKSGNAGYVQNFRGRVTMTRDTSISTAYMELSSLRSEDTAVYYCARGGRTSIWSFVFDYWGQGTLVTVSSASTKGPSVFPLAPSSKSTSGGTAALGCLVKDYFPEPVTVSWNSGALTSGVHTFPAVLQSSGLYSLSSVVTVPSSSLGTQTYICNVNHKPSNTKVDKKVEPKSCDKTHTCPPCPAPELLGGPSVFLFPPKPKDTLMISRTPEVTCVVVDVSHEDPEVKFNWYVDGVEVHNAKTKPCEEQYGSTYRCVSVLTVLHQDWLNGKEYKCKVSNKALPAPIEKTISKAKGQPREPQVYTLPPSREEMTKNQVSLTCLVKGFYPSDIAVEWESNGQPENNYKTTPPVLDSDGSFFLYSKLTVDKSRWQQGNVFSCSVMHEALHNHYTQKSLSLSPGK

SEQ ID NO: 2751 - protein, 630 aa, synthetic construct
  REGION 1..630: note = Synthetic
SPGQGTQSEISCTHFPGNLPNMLRDLRDAFSRVKTFFQMKDQLDNKLLKESLLEDFKGYLGCQALSEMIQFYLEEVMPQAENQDPDIKAHVNSLGENLKTLRERLRRCHRFLPCENVGGSGGKSKAVEQVKNAFNKLQEKGIYKAMSEFDIFINYIEAYMTMKIRNGGGGSGGGGSQVQLVQSGAEVKKPGASVKVSCKASGYTFTSYDINWVRQATGQGLEWMGWMNPNRGNTGYVKKFQGRVTMTRDTSISTAYMELSSLRSEDTAVYYCARRRAVYRSSWEWYFDLWGRGTLVTVSSASTKGPSVFPLAPSSKSTSGGTAALGCLVKDYFPEPVTVSWNSGALTSGVHTFPAVLQSSGLYSLSSVVTVPSSSLGTQTYICNVNHKPSNTKVDKKVEPKSCDKTHTCPPCPAPELLGGPSVFLFPPKPKDTLMISRTPEVTCVVVDVSHEDPEVKFNWYVDGVEVHNAKTKPCEEQYGSTYRCVSVLTVLHQDWLNGKEYKCKVSNKALPAPIEKTISKAKGQPREPQVYTLPPSREEMTKNQVSLTCLVKGFYPSDIAVEWESNGQPENNYKTTPPVLDSDGSFFLYSKLTVDKSRWQQGNVFSCSVMHEALHNHYTQKSLSLSPGK

SEQ ID NO: 2752 - protein, 628 aa, synthetic construct
  REGION 1..628: note = Synthetic
SPGQGTQSEQSCTHFPGNLPNMLRDLRDAFSRVKTFFQMKDQLDNKLLKESLLEDFKGYLGCQALSEMIQFYLEEVMPQAENQDPDIKAHVNSLGENLKTLRERLRRCHRFLPCENAGGSGGKSKAVEQVKNAFNKLQEKGIYKAMSEFDIFINYIEAYMTMKIRNGGGGSGGGGSQVQLVQSGAEVKKPGASVKVSCKASGYTFTSYDINWVRQATGQGLEWMGRMNPKSGNAGYVQNFRGRVTMTRDTSISTAYMELSSLRSEDTAVYYCARGGRTSIWSFVFDYWGQGTLVTVSSASTKGPSVFPLAPSSKSTSGGTAALGCLVKDYFPEPVTVSWNSGALTSGVHTFPAVLQSSGLYSLSSVVTVPSSSLGTQTYICNVNHKPSNTKVDKKVEPKSCDKTHTCPPCPAPELLGGPSVFLFPPKPKDTLMISRTPEVTCVVVDVSHEDPEVKFNWYVDGVEVHNAKTKPCEEQYGSTYRCVSVLTVLHQDWLNGKEYKCKVSNKALPAPIEKTISKAKGQPREPQVYTLPPSREEMTKNQVSLTCLVKGFYPSDIAVEWESNGQPENNYKTTPPVLDSDGSFFLYSKLTVDKSRWQQGNVFSCSVMHEALHNHYTQKSLSLSPGK

SEQ ID NO: 2753 - protein, 630 aa, synthetic construct
  REGION 1..630: note = Synthetic
SPGQGTQSEQSCTHFPGNLPNMLRDLRDAFSRVKTFFQMKDQLDNKLLKESLLEDFKGYLGCQALSEMIQFYLEEVMPQAENQDPDIKAHVNSLGENLKTLRERLRRCHRFLPCENAGGSGGKSKAVEQVKNAFNKLQEKGIYKAMSEFDIFINYIEAYMTMKIRNGGGGSGGGGSQVQLVQSGAEVKKPGASVKVSCKASGYTFTSYDINWVRQATGQGLEWMGWMNPNRGNTGYVKKFQGRVTMTRDTSISTAYMELSSLRSEDTAVYYCARRRAVYRSSWEWYFDLWGRGTLVTVSSASTKGPSVFPLAPSSKSTSGGTAALGCLVKDYFPEPVTVSWNSGALTSGVHTFPAVLQSSGLYSLSSVVTVPSSSLGTQTYICNVNHKPSNTKVDKKVEPKSCDKTHTCPPCPAPELLGGPSVFLFPPKPKDTLMISRTPEVTCVVVDVSHEDPEVKFNWYVDGVEVHNAKTKPCEEQYGSTYRCVSVLTVLHQDWLNGKEYKCKVSNKALPAPIEKTISKAKGQPREPQVYTLPPSREEMTKNQVSLTCLVKGFYPSDIAVEWESNGQPENNYKTTPPVLDSDGSFFLYSKLTVDKSRWQQGNVFSCSVMHEALHNHYTQKSLSLSPGK

SEQ ID NO: 2754 - protein, 628 aa, synthetic construct
  REGION 1..628: note = Synthetic
SPGQGTQSEQSCTHFPGNLPNMLRDLRDAFSRVKTFFQMKDQLDNKLLKESLLEDFKGYLGCQALSEMIQFYLEEVMPQAENQDPDIKAHVNSLGENLKTLRERLRRCHRFLPCENVGGSGGKSKAVEQVKNAFNKLQEKGIYKAMSEFDIFINYIEAYMTMKIRNGGGGSGGGGSQVQLVQSGAEVKKPGASVKVSCKASGYTFTSYDINWVRQATGQGLEWMGRMNPKSGNAGYVQNFRGRVTMTRDTSISTAYMELSSLRSEDTAVYYCARGGRTSIWSFVFDYWGQGTLVTVSSASTKGPSVFPLAPSSKSTSGGTAALGCLVKDYFPEPVTVSWNSGALTSGVHTFPAVLQSSGLYSLSSVVTVPSSSLGTQTYICNVNHKPSNTKVDKKVEPKSCDKTHTCPPCPAPELLGGPSVFLFPPKPKDTLMISRTPEVTCVVVDVSHEDPEVKFNWYVDGVEVHNAKTKPCEEQYGSTYRCVSVLTVLHQDWLNGKEYKCKVSNKALPAPIEKTISKAKGQPREPQVYTLPPSREEMTKNQVSLTCLVKGFYPSDIAVEWESNGQPENNYKTTPPVLDSDGSFFLYSKLTVDKSRWQQGNVFSCSVMHEALHNHYTQKSLSLSPGK

SEQ ID NO: 2755 - protein, 630 aa, synthetic construct
  REGION 1..630: note = Synthetic
SPGQGTQSEQSCTHFPGNLPNMLRDLRDAFSRVKTFFQMKDQLDNKLLKESLLEDFKGYLGCQALSEMIQFYLEEVMPQAENQDPDIKAHVNSLGENLKTLRERLRRCHRFLPCENVGGSGGKSKAVEQVKNAFNKLQEKGIYKAMSEFDIFINYIEAYMTMKIRNGGGGSGGGGSQVQLVQSGAEVKKPGASVKVSCKASGYTFTSYDINWVRQATGQGLEWMGWMNPNRGNTGYVKKFQGRVTMTRDTSISTAYMELSSLRSEDTAVYYCARRRAVYRSSWEWYFDLWGRGTLVTVSSASTKGPSVFPLAPSSKSTSGGTAALGCLVKDYFPEPVTVSWNSGALTSGVHTFPAVLQSSGLYSLSSVVTVPSSSLGTQTYICNVNHKPSNTKVDKKVEPKSCDKTHTCPPCPAPELLGGPSVFLFPPKPKDTLMISRTPEVTCVVVDVSHEDPEVKFNWYVDGVEVHNAKTKPCEEQYGSTYRCVSVLTVLHQDWLNGKEYKCKVSNKALPAPIEKTISKAKGQPREPQVYTLPPSREEMTKNQVSLTCLVKGFYPSDIAVEWESNGQPENNYKTTPPVLDSDGSFFLYSKLTVDKSRWQQGNVFSCSVMHEALHNHYTQKSLSLSPGK

SEQ ID NO: 2756 - protein, 626 aa, synthetic construct
  REGION 1..626: note = Synthetic
QVQLVQSGAEVKKPGASVKVSCKASGYTFTSYDINWVRQATGQGLEWMGRMNPKSGNAGYVQNFRGRVTMTRDTSISTAYMELSSLRSEDTAVYYCARGGRTSIWSFVFDYWGQGTLVTVSSASTKGPSVFPLAPSSKSTSGGTAALGCLVKDYFPEPVTVSWNSGALTSGVHTFPAVLQSSGLYSLSSVVTVPSSSLGTQTYICNVNHKPSNTKVDKKVEPKSCGGGGSPGQGTQSENSCTHFPGNLPNMLRDLRDAFSRVKTFFQMKDQLDNKLLKESLLEDFKGYLGCQALSEMIQFYLEEVMPQAENQDPDIKAHVNSLGENLKTLRERLRRCHRFLPCENAGGSGGKSKAVEQVKNAFNKLQEKGIYKAMSEFDIFINYIEAYMTMKIRNGGGGDKTHTCPPCPAPELLGGPSVFLFPPKPKDTLMISRTPEVTCVVVDVSHEDPEVKFNWYVDGVEVHNAKTKPCEEQYGSTYRCVSVLTVLHQDWLNGKEYKCKVSNKALPAPIEKTISKAKGQPREPQVYTLPPSREEMTKNQVSLTCLVKGFYPSDIAVEWESNGQPENNYKTTPPVLDSDGSFFLYSKLTVDKSRWQQGNVFSCSVMHEALHNHYTQKSLSLSPGK

SEQ ID NO: 2757 - protein, 626 aa, synthetic construct
  REGION 1..626: note = Synthetic
QVQLVQSGAEVKKPGASVKVSCKASGYTFTSYDINWVRQATGQGLEWMGRMNPKSGNAGYVQNFRGRVTMTRDTSISTAYMELSSLRSEDTAVYYCARGGRTSIWSFVFDYWGQGTLVTVSSASTKGPSVFPLAPSSKSTSGGTAALGCLVKDYFPEPVTVSWNSGALTSGVHTFPAVLQSSGLYSLSSVVTVPSSSLGTQTYICNVNHKPSNTKVDKKVEPKSCGGGGSPGQGTQSENSCTHFPGNLPNMLRDLRDAFSRVKTFFQMKDQLDNKLLKESLLEDFKGYLGCQALSEMIQFYLEEVMPQAENQDPDIKAHVNSLGENLKTLRERLRRCHRFLPCENVGGSGGKSKAVEQVKNAFNKLQEKGIYKAMSEFDIFINYIEAYMTMKIRNGGGGDKTHTCPPCPAPELLGGPSVFLFPPKPKDTLMISRTPEVTCVVVDVSHEDPEVKFNWYVDGVEVHNAKTKPCEEQYGSTYRCVSVLTVLHQDWLNGKEYKCKVSNKALPAPIEKTISKAKGQPREPQVYTLPPSREEMTKNQVSLTCLVKGFYPSDIAVEWESNGQPENNYKTTPPVLDSDGSFFLYSKLTVDKSRWQQGNVFSCSVMHEALHNHYTQKSLSLSPGK

SEQ ID NO: 2758 - protein, 626 aa, synthetic construct
  REGION 1..626: note = Synthetic
QVQLVQSGAEVKKPGASVKVSCKASGYTFTSYDINWVRQATGQGLEWMGRMNPKSGNAGYVQNFRGRVTMTRDTSISTAYMELSSLRSEDTAVYYCARGGRTSIWSFVFDYWGQGTLVTVSSASTKGPSVFPLAPSSKSTSGGTAALGCLVKDYFPEPVTVSWNSGALTSGVHTFPAVLQSSGLYSLSSVVTVPSSSLGTQTYICNVNHKPSNTKVDKKVEPKSCGGGGSPGQGTQSEISCTHFPGNLPNMLRDLRDAFSRVKTFFQMKDQLDNKLLKESLLEDFKGYLGCQALSEMIQFYLEEVMPQAENQDPDIKAHVNSLGENLKTLRERLRRCHRFLPCENAGGSGGKSKAVEQVKNAFNKLQEKGIYKAMSEFDIFINYIEAYMTMKIRNGGGGDKTHTCPPCPAPELLGGPSVFLFPPKPKDTLMISRTPEVTCVVVDVSHEDPEVKFNWYVDGVEVHNAKTKPCEEQYGSTYRCVSVLTVLHQDWLNGKEYKCKVSNKALPAPIEKTISKAKGQPREPQVYTLPPSREEMTKNQVSLTCLVKGFYPSDIAVEWESNGQPENNYKTTPPVLDSDGSFFLYSKLTVDKSRWQQGNVFSCSVMHEALHNHYTQKSLSLSPGK

SEQ ID NO: 2759 - protein, 626 aa, synthetic construct
  REGION 1..626: note = Synthetic
QVQLVQSGAEVKKPGASVKVSCKASGYTFTSYDINWVRQATGQGLEWMGRMNPKSGNAGYVQNFRGRVTMTRDTSISTAYMELSSLRSEDTAVYYCARGGRTSIWSFVFDYWGQGTLVTVSSASTKGPSVFPLAPSSKSTSGGTAALGCLVKDYFPEPVTVSWNSGALTSGVHTFPAVLQSSGLYSLSSVVTVPSSSLGTQTYICNVNHKPSNTKVDKKVEPKSCGGGGSPGQGTQSEISCTHFPGNLPNMLRDLRDAFSRVKTFFQMKDQLDNKLLKESLLEDFKGYLGCQALSEMIQFYLEEVMPQAENQDPDIKAHVNSLGENLKTLRERLRRCHRFLPCENVGGSGGKSKAVEQVKNAFNKLQEKGIYKAMSEFDIFINYIEAYMTMKIRNGGGGDKTHTCPPCPAPELLGGPSVFLFPPKPKDTLMISRTPEVTCVVVDVSHEDPEVKFNWYVDGVEVHNAKTKPCEEQYGSTYRCVSVLTVLHQDWLNGKEYKCKVSNKALPAPIEKTISKAKGQPREPQVYTLPPSREEMTKNQVSLTCLVKGFYPSDIAVEWESNGQPENNYKTTPPVLDSDGSFFLYSKLTVDKSRWQQGNVFSCSVMHEALHNHYTQKSLSLSPGK

SEQ ID NO: 2760 - protein, 626 aa, synthetic construct
  REGION 1..626: note = Synthetic
QVQLVQSGAEVKKPGASVKVSCKASGYTFTSYDINWVRQATGQGLEWMGRMNPKSGNAGYVQNFRGRVTMTRDTSISTAYMELSSLRSEDTAVYYCARGGRTSIWSFVFDYWGQGTLVTVSSASTKGPSVFPLAPSSKSTSGGTAALGCLVKDYFPEPVTVSWNSGALTSGVHTFPAVLQSSGLYSLSSVVTVPSSSLGTQTYICNVNHKPSNTKVDKKVEPKSCGGGGSPGQGTQSEQSCTHFPGNLPNMLRDLRDAFSRVKTFFQMKDQLDNKLLKESLLEDFKGYLGCQALSEMIQFYLEEVMPQAENQDPDIKAHVNSLGENLKTLRERLRRCHRFLPCENAGGSGGKSKAVEQVKNAFNKLQEKGIYKAMSEFDIFINYIEAYMTMKIRNGGGGDKTHTCPPCPAPELLGGPSVFLFPPKPKDTLMISRTPEVTCVVVDVSHEDPEVKFNWYVDGVEVHNAKTKPCEEQYGSTYRCVSVLTVLHQDWLNGKEYKCKVSNKALPAPIEKTISKAKGQPREPQVYTLPPSREEMTKNQVSLTCLVKGFYPSDIAVEWESNGQPENNYKTTPPVLDSDGSFFLYSKLTVDKSRWQQGNVFSCSVMHEALHNHYTQKSLSLSPGK

SEQ ID NO: 2761 - protein, 626 aa, synthetic construct
  REGION 1..626: note = Synthetic
QVQLVQSGAEVKKPGASVKVSCKASGYTFTSYDINWVRQATGQGLEWMGRMNPKSGNAGYVQNFRGRVTMTRDTSISTAYMELSSLRSEDTAVYYCARGGRTSIWSFVFDYWGQGTLVTVSSASTKGPSVFPLAPSSKSTSGGTAALGCLVKDYFPEPVTVSWNSGALTSGVHTFPAVLQSSGLYSLSSVVTVPSSSLGTQTYICNVNHKPSNTKVDKKVEPKSCGGGGSPGQGTQSEQSCTHFPGNLPNMLRDLRDAFSRVKTFFQMKDQLDNKLLKESLLEDFKGYLGCQALSEMIQFYLEEVMPQAENQDPDIKAHVNSLGENLKTLRERLRRCHRFLPCENVGGSGGKSKAVEQVKNAFNKLQEKGIYKAMSEFDIFINYIEAYMTMKIRNGGGGDKTHTCPPCPAPELLGGPSVFLFPPKPKDTLMISRTPEVTCVVVDVSHEDPEVKFNWYVDGVEVHNAKTKPCEEQYGSTYRCVSVLTVLHQDWLNGKEYKCKVSNKALPAPIEKTISKAKGQPREPQVYTLPPSREEMTKNQVSLTCLVKGFYPSDIAVEWESNGQPENNYKTTPPVLDSDGSFFLYSKLTVDKSRWQQGNVFSCSVMHEALHNHYTQKSLSLSPGK

SEQ ID NO: 2762 - protein, 622 aa, synthetic construct
  REGION 1..622: note = Synthetic
QVQLVQSGAEVKKPGASVKVSCKASGYTFTSYDINWVRQATGQGLEWMGRMNPKSGNAGYVQNFRGRVTMTRDTSISTAYMELSSLRSEDTAVYYCARGGRTSIWSFVFDYWGQGTLVTVSSASTKGPSVFPLAPSSKSTSGGTAALGCLVKDYFPEPVTVSWNSGALTSGVHTFPAVLQSSGLYSLSSVVTVPSSSLGTQTYICNVNHKPSNTKVDKKVEPKSCDKTHTCPPCPAPELLGGPSVFLFPPKPKDTLMISRTPEVTCVVVDVSHEDPEVKFNWYVDGVEVHNAKTKPCEEQYGSTYRCVSVLTVLHQDWLNGKEYKCKVSNKALPAPIEKTISKAKGQPREPQVYTLPPSREEMTKNQVSLTCLVKGFYPSDIAVEWESNGQPENNYKTTPPVLDSDGSFFLYSKLTVDKSRWQQGNVFSCSVMHEALHNHYTQKSLSLSPGGGGGSSPGQGTQSENSCTHFPGNLPNMLRDLRDAFSRVKTFFQMKDQLDNKLLKESLLEDFKGYLGCQALSEMIQFYLEEVMPQAENQDPDIKAHVNSLGENLKTLRLRLRRCHPFLPCENGGGSGGKSKAVEQVKNAFNKLQEKGIYKAMSEFDIFINYIEAYMTMKIRN

SEQ ID NO: 2763 - protein, 622 aa, synthetic construct
  REGION 1..622: note = Synthetic
QVQLVQSGAEVKKPGASVKVSCKASGYTFTSYDINWVRQATGQGLEWMGRMNPKSGNAGYVQNFRGRVTMTRDTSISTAYMELSSLRSEDTAVYYCARGGRTSIWSFVFDYWGQGTLVTVSSASTKGPSVFPLAPSSKSTSGGTAALGCLVKDYFPEPVTVSWNSGALTSGVHTFPAVLQSSGLYSLSSVVTVPSSSLGTQTYICNVNHKPSNTKVDKKVEPKSCDKTHTCPPCPAPELLGGPSVFLFPPKPKDTLMISRTPEVTCVVVDVSHEDPEVKFNWYVDGVEVHNAKTKPCEEQYGSTYRCVSVLTVLHQDWLNGKEYKCKVSNKALPAPIEKTISKAKGQPREPQVYTLPPSREEMTKNQVSLTCLVKGFYPSDIAVEWESNGQPENNYKTTPPVLDSDGSFFLYSKLTVDKSRWQQGNVFSCSVMHEALHNHYTQKSLSLSPGGGGGSSPGQGTQSEISCTHFPGNLPNMLRDLRDAFSRVKTFFQMKDQLDNKLLKESLLEDFKGYLGCQALSEMIQFYLEEVMPQAENQDPDIKAHVNSLGENLKTLRERLRRCHRFLPCENAGGSGGKSKAVEQVKNAFNKLQEKGIYKAMSEFDIFINYIEAYMTMKIRN

SEQ ID NO: 2764 - protein, 622 aa, synthetic construct
  REGION 1..622: note = Synthetic
QVQLVQSGAEVKKPGASVKVSCKASGYTFTSYDINWVRQATGQGLEWMGRMNPKSGNAGYVQNFRGRVTMTRDTSISTAYMELSSLRSEDTAVYYCARGGRTSIWSFVFDYWGQGTLVTVSSASTKGPSVFPLAPSSKSTSGGTAALGCLVKDYFPEPVTVSWNSGALTSGVHTFPAVLQSSGLYSLSSVVTVPSSSLGTQTYICNVNHKPSNTKVDKKVEPKSCDKTHTCPPCPAPELLGGPSVFLFPPKPKDTLMISRTPEVTCVVVDVSHEDPEVKFNWYVDGVEVHNAKTKPCEEQYGSTYRCVSVLTVLHQDWLNGKEYKCKVSNKALPAPIEKTISKAKGQPREPQVYTLPPSREEMTKNQVSLTCLVKGFYPSDIAVEWESNGQPENNYKTTPPVLDSDGSFFLYSKLTVDKSRWQQGNVFSCSVMHEALHNHYTQKSLSLSPGGGGGSSPGQGTQSEISCTHFPGNLPNMLRDLRDAFSRVKTFFQMKDQLDNKLLKESLLEDFKGYLGCQALSEMIQFYLEEVMPQAENQDPDIKAHVNSLGENLKTLRERLRRCHRFLPCENGGGSGGKSKAVEQVKNAFNKLQEKGIYKAMSEFDIFINYIEAYMTMKIRN

SEQ ID NO: 2765 - protein, 622 aa, synthetic construct
  REGION 1..622: note = Synthetic
QVQLVQSGAEVKKPGASVKVSCKASGYTFTSYDINWVRQATGQGLEWMGRMNPKSGNAGYVQNFRGRVTMTRDTSISTAYMELSSLRSEDTAVYYCARGGRTSIWSFVFDYWGQGTLVTVSSASTKGPSVFPLAPSSKSTSGGTAALGCLVKDYFPEPVTVSWNSGALTSGVHTFPAVLQSSGLYSLSSVVTVPSSSLGTQTYICNVNHKPSNTKVDKKVEPKSCDKTHTCPPCPAPELLGGPSVFLFPPKPKDTLMISRTPEVTCVVVDVSHEDPEVKFNWYVDGVEVHNAKTKPCEEQYGSTYRCVSVLTVLHQDWLNGKEYKCKVSNKALPAPIEKTISKAKGQPREPQVYTLPPSREEMTKNQVSLTCLVKGFYPSDIAVEWESNGQPENNYKTTPPVLDSDGSFFLYSKLTVDKSRWQQGNVFSCSVMHEALHNHYTQKSLSLSPGGGGGSSPGQGTQSEQSCTHFPGNLPNMLRDLRDAFSRVKTFFQMKDQLDNKLLKESLLEDFKGYLGCQALSEMIQFYLEEVMPQAENQDPDIKAHVNSLGENLKTLRERLRRCHRFLPCEQGGGSGGKSKAVEQVKNAFNKLQEKGIYKAMSEFDIFINYIEAYMTMKIRN

SEQ ID NO: 2766 - protein, 622 aa, synthetic construct
  REGION 1..622: note = Synthetic
QVQLVQSGAEVKKPGASVKVSCKASGYTFTSYDINWVRQATGQGLEWMGRMNPKSGNAGYVQNFRGRVTMTRDTSISTAYMELSSLRSEDTAVYYCARGGRTSIWSFVFDYWGQGTLVTVSSASTKGPSVFPLAPSSKSTSGGTAALGCLVKDYFPEPVTVSWNSGALTSGVHTFPAVLQSSGLYSLSSVVTVPSSSLGTQTYICNVNHKPSNTKVDKKVEPKSCDKTHTCPPCPAPELLGGPSVFLFPPKPKDTLMISRTPEVTCVVVDVSHEDPEVKFNWYVDGVEVHNAKTKPCEEQYGSTYRCVSVLTVLHQDWLNGKEYKCKVSNKALPAPIEKTISKAKGQPREPQVYTLPPSREEMTKNQVSLTCLVKGFYPSDIAVEWESNGQPENNYKTTPPVLDSDGSFFLYSKLTVDKSRWQQGNVFSCSVMHEALHNHYTQKSLSLSPGGGGGSSPGQGTQSEQSCTHFPGNLPNMLRDLRDAFSRVKTFFQMKDQLDNKLLKESLLEDFKGYLGCQALSEMIQFYLEEVMPQAENQDPDIKAHVNSLGENLKTLRERLRRCHRFLPCENGGGSGGKSKAVEQVKNAFNKLQEKGIYKAMSEFDIFINYIEAYMTMKIRN

SEQ ID NO: 2767 - protein, 628 aa, synthetic construct
  REGION 1..628: note = Synthetic
QVQLVQSGAEVKKPGASVKVSCKASGYTFTSYDINWVRQATGQGLEWMGWMNPNRGNTGYVKKFQGRVTMTRDTSISTAYMELSSLRSEDTAVYYCARRRAVYRSSWEWYFDLWGRGTLVTVSSASTKGPSVFPLAPSSKSTSGGTAALGCLVKDYFPEPVTVSWNSGALTSGVHTFPAVLQSSGLYSLSSVVTVPSSSLGTQTYICNVNHKPSNTKVDKKVEPKSCGGGGSPGQGTQSENSCTHFPGNLPNMLRDLRDAFSRVKTFFQMKDQLDNKLLKESLLEDFKGYLGCQALSEMIQFYLEEVMPQAENQDPDIKAHVNSLGENLKTLRERLRRCHRFLPCENAGGSGGKSKAVEQVKNAFNKLQEKGIYKAMSEFDIFINYIEAYMTMKIRNGGGGDKTHTCPPCPAPELLGGPSVFLFPPKPKDTLMISRTPEVTCVVVDVSHEDPEVKFNWYVDGVEVHNAKTKPCEEQYGSTYRCVSVLTVLHQDWLNGKEYKCKVSNKALPAPIEKTISKAKGQPREPQVYTLPPSREEMTKNQVSLTCLVKGFYPSDIAVEWESNGQPENNYKTTPPVLDSDGSFFLYSKLTVDKSRWQQGNVFSCSVMHEALHNHYTQKSLSLSPGK

SEQ ID NO: 2768 - protein, 628 aa, synthetic construct
  REGION 1..628: note = Synthetic
QVQLVQSGAEVKKPGASVKVSCKASGYTFTSYDINWVRQATGQGLEWMGWMNPNRGNTGYVKKFQGRVTMTRDTSISTAYMELSSLRSEDTAVYYCARRRAVYRSSWEWYFDLWGRGTLVTVSSASTKGPSVFPLAPSSKSTSGGTAALGCLVKDYFPEPVTVSWNSGALTSGVHTFPAVLQSSGLYSLSSVVTVPSSSLGTQTYICNVNHKPSNTKVDKKVEPKSCGGGGSPGQGTQSENSCTHFPGNLPNMLRDLRDAFSRVKTFFQMKDQLDNKLLKESLLEDFKGYLGCQALSEMIQFYLEEVMPQAENQDPDIKAHVNSLGENLKTLRERLRRCHRFLPCENVGGSGGKSKAVEQVKNAFNKLQEKGIYKAMSEFDIFINYIEAYMTMKIRNGGGGDKTHTCPPCPAPELLGGPSVFLFPPKPKDTLMISRTPEVTCVVVDVSHEDPEVKFNWYVDGVEVHNAKTKPCEEQYGSTYRCVSVLTVLHQDWLNGKEYKCKVSNKALPAPIEKTISKAKGQPREPQVYTLPPSREEMTKNQVSLTCLVKGFYPSDIAVEWESNGQPENNYKTTPPVLDSDGSFFLYSKLTVDKSRWQQGNVFSCSVMHEALHNHYTQKSLSLSPGK

SEQ ID NO: 2769 - protein, 628 aa, synthetic construct
  REGION 1..628: note = Synthetic
QVQLVQSGAEVKKPGASVKVSCKASGYTFTSYDINWVRQATGQGLEWMGWMNPNRGNTGYVKKFQGRVTMTRDTSISTAYMELSSLRSEDTAVYYCARRRAVYRSSWEWYFDLWGRGTLVTVSSASTKGPSVFPLAPSSKSTSGGTAALGCLVKDYFPEPVTVSWNSGALTSGVHTFPAVLQSSGLYSLSSVVTVPSSSLGTQTYICNVNHKPSNTKVDKKVEPKSCGGGGSPGQGTQSEISCTHFPGNLPNMLRDLRDAFSRVKTFFQMKDQLDNKLLKESLLEDFKGYLGCQALSEMIQFYLEEVMPQAENQDPDIKAHVNSLGENLKTLRERLRRCHRFLPCENAGGSGGKSKAVEQVKNAFNKLQEKGIYKAMSEFDIFINYIEAYMTMKIRNGGGGDKTHTCPPCPAPELLGGPSVFLFPPKPKDTLMISRTPEVTCVVVDVSHEDPEVKFNWYVDGVEVHNAKTKPCEEQYGSTYRCVSVLTVLHQDWLNGKEYKCKVSNKALPAPIEKTISKAKGQPREPQVYTLPPSREEMTKNQVSLTCLVKGFYPSDIAVEWESNGQPENNYKTTPPVLDSDGSFFLYSKLTVDKSRWQQGNVFSCSVMHEALHNHYTQKSLSLSPGK

SEQ ID NO: 2770 - protein, 628 aa, synthetic construct
  REGION 1..628: note = Synthetic
QVQLVQSGAEVKKPGASVKVSCKASGYTFTSYDINWVRQATGQGLEWMGWMNPNRGNTGYVKKFQGRVTMTRDTSISTAYMELSSLRSEDTAVYYCARRRAVYRSSWEWYFDLWGRGTLVTVSSASTKGPSVFPLAPSSKSTSGGTAALGCLVKDYFPEPVTVSWNSGALTSGVHTFPAVLQSSGLYSLSSVVTVPSSSLGTQTYICNVNHKPSNTKVDKKVEPKSCGGGGSPGQGTQSEISCTHFPGNLPNMLRDLRDAFSRVKTFFQMKDQLDNKLLKESLLEDFKGYLGCQALSEMIQFYLEEVMPQAENQDPDIKAHVNSLGENLKTLRERLRRCHRFLPCENVGGSGGKSKAVEQVKNAFNKLQEKGIYKAMSEFDIFINYIEAYMTMKIRNGGGGDKTHTCPPCPAPELLGGPSVFLFPPKPKDTLMISRTPEVTCVVVDVSHEDPEVKFNWYVDGVEVHNAKTKPCEEQYGSTYRCVSVLTVLHQDWLNGKEYKCKVSNKALPAPIEKTISKAKGQPREPQVYTLPPSREEMTKNQVSLTCLVKGFYPSDIAVEWESNGQPENNYKTTPPVLDSDGSFFLYSKLTVDKSRWQQGNVFSCSVMHEALHNHYTQKSLSLSPGK

SEQ ID NO: 2771 - protein, 628 aa, synthetic construct
  REGION 1..628: note = Synthetic
QVQLVQSGAEVKKPGASVKVSCKASGYTFTSYDINWVRQATGQGLEWMGWMNPNRGNTGYVKKFQGRVTMTRDTSISTAYMELSSLRSEDTAVYYCARRRAVYRSSWEWYFDLWGRGTLVTVSSASTKGPSVFPLAPSSKSTSGGTAALGCLVKDYFPEPVTVSWNSGALTSGVHTFPAVLQSSGLYSLSSVVTVPSSSLGTQTYICNVNHKPSNTKVDKKVEPKSCGGGGSPGQGTQSEQSCTHFPGNLPNMLRDLRDAFSRVKTFFQMKDQLDNKLLKESLLEDFKGYLGCQALSEMIQFYLEEVMPQAENQDPDIKAHVNSLGENLKTLRERLRRCHRFLPCENAGGSGGKSKAVEQVKNAFNKLQEKGIYKAMSEFDIFINYIEAYMTMKIRNGGGGDKTHTCPPCPAPELLGGPSVFLFPPKPKDTLMISRTPEVTCVVVDVSHEDPEVKFNWYVDGVEVHNAKTKPCEEQYGSTYRCVSVLTVLHQDWLNGKEYKCKVSNKALPAPIEKTISKAKGQPREPQVYTLPPSREEMTKNQVSLTCLVKGFYPSDIAVEWESNGQPENNYKTTPPVLDSDGSFFLYSKLTVDKSRWQQGNVFSCSVMHEALHNHYTQKSLSLSPGK

SEQ ID NO: 2772 - protein, 628 aa, synthetic construct
  REGION 1..628: note = Synthetic
QVQLVQSGAEVKKPGASVKVSCKASGYTFTSYDINWVRQATGQGLEWMGWMNPNRGNTGYVKKFQGRVTMTRDTSISTAYMELSSLRSEDTAVYYCARRRAVYRSSWEWYFDLWGRGTLVTVSSASTKGPSVFPLAPSSKSTSGGTAALGCLVKDYFPEPVTVSWNSGALTSGVHTFPAVLQSSGLYSLSSVVTVPSSSLGTQTYICNVNHKPSNTKVDKKVEPKSCGGGGSPGQGTQSEQSCTHFPGNLPNMLRDLRDAFSRVKTFFQMKDQLDNKLLKESLLEDFKGYLGCQALSEMIQFYLEEVMPQAENQDPDIKAHVNSLGENLKTLRERLRRCHRFLPCENVGGSGGKSKAVEQVKNAFNKLQEKGIYKAMSEFDIFINYIEAYMTMKIRNGGGGDKTHTCPPCPAPELLGGPSVFLFPPKPKDTLMISRTPEVTCVVVDVSHEDPEVKFNWYVDGVEVHNAKTKPCEEQYGSTYRCVSVLTVLHQDWLNGKEYKCKVSNKALPAPIEKTISKAKGQPREPQVYTLPPSREEMTKNQVSLTCLVKGFYPSDIAVEWESNGQPENNYKTTPPVLDSDGSFFLYSKLTVDKSRWQQGNVFSCSVMHEALHNHYTQKSLSLSPGK

SEQ ID NO: 2773 - protein, 624 aa, synthetic construct
  REGION 1..624: note = Synthetic
QVQLVQSGAEVKKPGASVKVSCKASGYTFTSYDINWVRQATGQGLEWMGWMNPNRGNTGYVKKFQGRVTMTRDTSISTAYMELSSLRSEDTAVYYCARRRAVYRSSWEWYFDLWGRGTLVTVSSASTKGPSVFPLAPSSKSTSGGTAALGCLVKDYFPEPVTVSWNSGALTSGVHTFPAVLQSSGLYSLSSVVTVPSSSLGTQTYICNVNHKPSNTKVDKKVEPKSCDKTHTCPPCPAPELLGGPSVFLFPPKPKDTLMISRTPEVTCVVVDVSHEDPEVKFNWYVDGVEVHNAKTKPCEEQYGSTYRCVSVLTVLHQDWLNGKEYKCKVSNKALPAPIEKTISKAKGQPREPQVYTLPPSREEMTKNQVSLTCLVKGFYPSDIAVEWESNGQPENNYKTTPPVLDSDGSFFLYSKLTVDKSRWQQGNVFSCSVMHEALHNHYTQKSLSLSPGGGGGSSPGQGTQSENSCTHFPGNLPNMLRDLRDAFSRVKTFFQMKDQLDNKLLKESLLEDFKGYLGCQALSEMIQFYLEEVMPQAENQDPDIKAHVNSLGENLKTLRLRLRRCHPFLPCENAGGSGGKSKAVEQVKNAFNKLQEKGIYKAMSEFDIFINYIEAYMTMKIRN

SEQ ID NO: 2774 - protein, 624 aa, synthetic construct
  REGION 1..624: note = Synthetic
QVQLVQSGAEVKKPGASVKVSCKASGYTFTSYDINWVRQATGQGLEWMGWMNPNRGNTGYVKKFQGRVTMTRDTSISTAYMELSSLRSEDTAVYYCARRRAVYRSSWEWYFDLWGRGTLVTVSSASTKGPSVFPLAPSSKSTSGGTAALGCLVKDYFPEPVTVSWNSGALTSGVHTFPAVLQSSGLYSLSSVVTVPSSSLGTQTYICNVNHKPSNTKVDKKVEPKSCDKTHTCPPCPAPELLGGPSVFLFPPKPKDTLMISRTPEVTCVVVDVSHEDPEVKFNWYVDGVEVHNAKTKPCEEQYGSTYRCVSVLTVLHQDWLNGKEYKCKVSNKALPAPIEKTISKAKGQPREPQVYTLPPSREEMTKNQVSLTCLVKGFYPSDIAVEWESNGQPENNYKTTPPVLDSDGSFFLYSKLTVDKSRWQQGNVFSCSVMHEALHNHYTQKSLSLSPGGGGGSSPGQGTQSENSCTHFPGNLPNMLRDLRDAFSRVKTFFQMKDQLDNKLLKESLLEDFKGYLGCQALSEMIQFYLEEVMPQAENQDPDIKAHVNSLGENLKTLRLRLRRCHPFLPCENGGGSGGKSKAVEQVKNAFNKLQEKGIYKAMSEFDIFINYIEAYMTMKIRN

SEQ ID NO: 2775 - protein, 624 aa, synthetic construct
  REGION 1..624: note = Synthetic
QVQLVQSGAEVKKPGASVKVSCKASGYTFTSYDINWVRQATGQGLEWMGWMNPNRGNTGYVKKFQGRVTMTRDTSISTAYMELSSLRSEDTAVYYCARRRAVYRSSWEWYFDLWGRGTLVTVSSASTKGPSVFPLAPSSKSTSGGTAALGCLVKDYFPEPVTVSWNSGALTSGVHTFPAVLQSSGLYSLSSVVTVPSSSLGTQTYICNVNHKPSNTKVDKKVEPKSCDKTHTCPPCPAPELLGGPSVFLFPPKPKDTLMISRTPEVTCVVVDVSHEDPEVKFNWYVDGVEVHNAKTKPCEEQYGSTYRCVSVLTVLHQDWLNGKEYKCKVSNKALPAPIEKTISKAKGQPREPQVYTLPPSREEMTKNQVSLTCLVKGFYPSDIAVEWESNGQPENNYKTTPPVLDSDGSFFLYSKLTVDKSRWQQGNVFSCSVMHEALHNHYTQKSLSLSPGGGGGSSPGQGTQSEISCTHFPGNLPNMLRDLRDAFSRVKTFFQMKDQLDNKLLKESLLEDFKGYLGCQALSEMIQFYLEEVMPQAENQDPDIKAHVNSLGENLKTLRERLRRCHRFLPCENGGGSGGKSKAVEQVKNAFNKLQEKGIYKAMSEFDIFINYIEAYMTMKIRN

SEQ ID NO: 2776 - protein, 624 aa, synthetic construct
  REGION 1..624: note = Synthetic
QVQLVQSGAEVKKPGASVKVSCKASGYTFTSYDINWVRQATGQGLEWMGWMNPNRGNTGYVKKFQGRVTMTRDTSISTAYMELSSLRSEDTAVYYCARRRAVYRSSWEWYFDLWGRGTLVTVSSASTKGPSVFPLAPSSKSTSGGTAALGCLVKDYFPEPVTVSWNSGALTSGVHTFPAVLQSSGLYSLSSVVTVPSSSLGTQTYICNVNHKPSNTKVDKKVEPKSCDKTHTCPPCPAPELLGGPSVFLFPPKPKDTLMISRTPEVTCVVVDVSHEDPEVKFNWYVDGVEVHNAKTKPCEEQYGSTYRCVSVLTVLHQDWLNGKEYKCKVSNKALPAPIEKTISKAKGQPREPQVYTLPPSREEMTKNQVSLTCLVKGFYPSDIAVEWESNGQPENNYKTTPPVLDSDGSFFLYSKLTVDKSRWQQGNVFSCSVMHEALHNHYTQKSLSLSPGGGGGSSPGQGTQSEQSCTHFPGNLPNMLRDLRDAFSRVKTFFQMKDQLDNKLLKESLLEDFKGYLGCQALSEMIQFYLEEVMPQAENQDPDIKAHVNSLGENLKTLRERLRRCHRFLPCENGGGSGGKSKAVEQVKNAFNKLQEKGIYKAMSEFDIFINYIEAYMTMKIRN

SEQ ID NO: 2777 - protein, 166 aa, synthetic construct
  REGION 1..166: note = Synthetic
SPGQGTQSENSCTHFPGNLPNMLRDLRDAFSRVKTFFQMKDQLDNKLLKESLLEDFKGYLGCQALSEMIQFYLEEVMPQAENQDPDIKAHVNSLGENLKTLRERLRRCHRFLPCENAGGSGGKSKAVEQVKNAFNKLQEKGIYKAMSEFDIFINYIEAYMTMKIRN

SEQ ID NO: 2778 - protein, 166 aa, synthetic construct
  REGION 1..166: note = Synthetic
SPGQGTQSENSCTHFPGNLPNMLRDLRDAFSRVKTFFQMKDQLDNKLLKESLLEDFKGYLGCQALSEMIQFYLEEVMPQAENQDPDIKAHVNSLGENLKTLRERLRRCHRFLPCENVGGSGGKSKAVEQVKNAFNKLQEKGIYKAMSEFDIFINYIEAYMTMKIRN

SEQ ID NO: 2779 - protein, 166 aa, synthetic construct
  REGION 1..166: note = Synthetic
SPGQGTQSENSCTHFPGNLPNMLRDLRDAFSRVKTFFQMKDQLDNKLLKESLLEDFKGYLGCQALSEMIQFYLEEVMPQAENQDPDIKAHVNSLGENLKTLRLRLRRCHPFLPCENAGGSGGKSKAVEQVKNAFNKLQEKGIYKAMSEFDIFINYIEAYMTMKIRN

SEQ ID NO: 2780 - protein, 166 aa, synthetic construct; identical to SEQ ID NO: 2398
  REGION 1..166: note = Synthetic

SEQ ID NO: 2781 - protein, 166 aa, synthetic construct
  REGION 1..166: note = Synthetic
SPGQGTQSEISCTHFPGNLPNMLRDLRDAFSRVKTFFQMKDQLDNKLLKESLLEDFKGYLGCQALSEMIQFYLEEVMPQAENQDPDIKAHVNSLGENLKTLRERLRRCHRFLPCENAGGSGGKSKAVEQVKNAFNKLQEKGIYKAMSEFDIFINYIEAYMTMKIRN

SEQ ID NO: 2782 - protein, 166 aa, synthetic construct
  REGION 1..166: note = Synthetic
SPGQGTQSEISCTHFPGNLPNMLRDLRDAFSRVKTFFQMKDQLDNKLLKESLLEDFKGYLGCQALSEMIQFYLEEVMPQAENQDPDIKAHVNSLGENLKTLRERLRRCHRFLPCENVGGSGGKSKAVEQVKNAFNKLQEKGIYKAMSEFDIFINYIEAYMTMKIRN

SEQ ID NO: 2783 - protein, 166 aa, synthetic construct
  REGION 1..166: note = Synthetic
SPGQGTQSEISCTHFPGNLPNMLRDLRDAFSRVKTFFQMKDQLDNKLLKESLLEDFKGYLGCQALSEMIQFYLEEVMPQAENQDPDIKAHVNSLGENLKTLRERLRRCHPFLPCENAGGSGGKSKAVEQVKNAFNKLQEKGIYKAMSEFDIFINYIEAYMTMKIRN

SEQ ID NO: 2784 - protein, 166 aa, synthetic construct
  REGION 1..166: note = Synthetic
SPGQGTQSEISCTHFPGNLPNMLRDLRDAFSRVKTFFQMKDQLDNKLLKESLLEDFKGYLGCQALSEMIQFYLEEVMPQAENQDPDIKAHVNSLGENLKTLRERLRRCHRFLPCENGGGSGGKSKAVEQVKNAFNKLQEKGIYKAMSEFDIFINYIEAYMTMKIRN

SEQ ID NO: 2785 - protein, 166 aa, synthetic construct
  REGION 1..166: note = Synthetic
SPGQGTQSEISCTHFPGNLPNMLRDLRDAFSRVKTFFQMKDQLDNKLLKESLLEDFKGYLGCQALSEMIQFYLEEVMPQAENQDPDIKAHVNSLGENLKTLRLRLRRCHPFLPCENAGGSGGKSKAVEQVKNAFNKLQEKGIYKAMSEFDIFINYIEAYMTMKIRN

SEQ ID NO: 2786 - protein, 166 aa, synthetic construct
  REGION 1..166: note = Synthetic
SPGQGTQSEKSCTHFPGNLPNMLRDLRDAFSRVKTFFQMKDQLDNKLLKESLLEDFKGYLGCQALSEMIQFYLEEVMPQAENQDPDIKAHVNSLGENLKTLRERLRRCHRFLPCENAGGSGGKSKAVEQVKNAFNKLQEKGIYKAMSEFDIFINYIEAYMTMKIRN

SEQ ID NO: 2787 - protein, 166 aa, synthetic construct
  REGION 1..166: note = Synthetic
SPGQGTQSEQSCTHFPGNLPNMLRDLRDAFSRVKTFFQMKDQLDNKLLKESLLEDFKGYLGCQALSEMIQFYLEEVMPQAENQDPDIKAHVNSLGENLKTLRERLRRCHRFLPCENVGGSGGKSKAVEQVKNAFNKLQEKGIYKAMSEFDIFINYIEAYMTMKIRN

SEQ ID NO: 2788 - protein, 166 aa, synthetic construct; identical to SEQ ID NO: 2787
  REGION 1..166: note = Synthetic

SEQ ID NO: 2789 - protein, 166 aa, synthetic construct
  REGION 1..166: note = Synthetic
SPGQGTQSEQSCTHFPGNLPNMLRDLRDAFSRVKTFFQMKDQLDNKLLKESLLEDFKGYLGCQALSEMIQFYLEEVMPQAENQDPDIKAHVNSLGENLKTLRERLRRCHRFLPCEQGGGSGGKSKAVEQVKNAFNKLQEKGIYKAMSEFDIFINYIEAYMTMKIRN

SEQ ID NO: 2790 - protein, 166 aa, synthetic construct
  REGION 1..166: note = Synthetic
SPGQGTQSEQSCTHFPGNLPNMLRDLRDAFSRVKTFFQMKDQLDNKLLKESLLEDFKGYLGCQALSEMIQFYLEEVMPQAENQDPDIKAHVNSLGENLKTLRERLRRCHRFLPCENGGGSGGKSKAVEQVKNAFNKLQEKGIYKAMSEFDIFINYIEAYMTMKIRN

SEQ ID NO: 2791 - protein, 166 aa, synthetic construct
  REGION 1..166: note = Synthetic
SPGQGTQSEQSCTHFPGNLPNMLRDLRDAFSRVKTFFQMKDQLDNKLLKESLLEDFKGYLGCQALSEMIQFYLEEVMPQAENQDPDIKAHVNSLGENLKTLRLRLRRCHPFLPCENAGGSGGKSKAVEQVKNAFNKLQEKGIYKAMSEFDIFINYIEAYMTMKIRN